(19) United States
(12) Patent Application Publication
(10) Pub. No.: US 2009/0012024 A1
(43) Pub. Date: Jan. 8, 2009

(54) Stem Cell Markers

(75) Inventors: Anne Collins, York (GB); Norman Maitland, York (GB); Steven Bryce, York (GB)

Correspondence Address: CROWELL & MORING LLP;INTELLECTUAL PROPERTY GROUP, P.O. BOX 14300, WASHINGTON, DC, 20044-4300, US

(73) Assignee: Procure Therapeutics Limited, York (GB)

(21) Appl. No.: 11/996,839

(22) PCT Filed: Jul. 19, 2006
(86) PCT No.: PCT/GB2006/002658

§ 371 Date: Sep. 11, 2008

(30) Foreign Application Priority Data
Jul. 26, 2005 (GB) 0515305.1
Jul. 26, 2005 (GB) 0515307.7
Jul. 26, 2005 (GB) 0515308.5
Jul. 26, 2005 (GB) 0515309.3

(51) Int. Cl. A61K 31/711; C07K 16/18; C12N 15/85; C12N 5/12; C12P 21/02; C12Q 1/68; A61P 35/00

(52) U.S. Cl. 514/44; 530/387.9; 530/387.3; 536/23.5; 435/328; 435/69.6; 435/320.1

(57) ABSTRACT

We disclose gene markers of stem cells, typically prostate stem cells, and in particular cancer stem cells, for example prostate cancer stem cells; therapeutic agents and diagnostic assays based on said stem cell genes; and including screening assays to identify therapeutic agents.

[0001] The invention relates to gene markers of stem cells, typically prostate stem cells, and in particular cancer stem cells, for example prostate cancer stem cells; therapeutic agents and diagnostic assays based on said stem cell genes and expression products; and including screening assays to identify therapeutic agents.

### BACKGROUND

[0002] A problem underlying the effective treatment of cancerous conditions is the identification of a population of cells in a tumour that have the ability of sustaining the growth of a tumour. The evidence suggests that tumours are clonal and are therefore derived from a single cell. However, there are few studies that identify and characterise those cells types that are responsible for maintaining tumour cell growth. Some have searched for these so called “cancer stem cells”.

[0003] We have identified CD133, which is expressed by primitive haematopoietic stem cells and developing epithelia as a further stem cell marker for prostate epithelia. CD133 cells are restricted to the α₂β₁^{hi} population (the receptor for type I collagen) and are located in the basal layer, often at the base of a budding region or branching point (FIG. 1A). α₂β₁^{hi}/CD133⁺ cells exhibit two important attributes of epithelial stem cells: they possess a high in vitro proliferative potential (FIG. 1B) and can reconstitute prostatic-like acini in immunocompromised male nude mice FIG. 1C).

[0004] In our co-pending application (WO 2005/089043) we describe the isolation of prostate stem cells which have been directly isolated from lymph node and prostate glands from a series of patient samples. These stem cells express markers that characterise the cells with stem cell properties. The following markers are typically expressed as prostate stem cell markers; human epithelial antigen (HEA), CD44, α₂β₁^{hi} and CD133. Morphologically the cells range from fibroblastoid (expressing high levels of vimentin which is typical of transformed cells) or epithelial, and are capable of producing progenitors associated with prostate epithelial differentiation. Invasion assays, using Matrigel-coated filters have determined that these cells have 2-3 fold greater capacity to invade through Matrigel than PC3M (a highly metastatic sub-line of PC3 cells).

### DESCRIPTION OF THE DISCLOSURE

[0005] We have conducted array analysis of CD133 positive prostate stem cells and compared expression of genes between CD133 positive stem cells and CD133 positive cancer stem cells.

### Growth Factors/Receptors

[0006] The array analysis has identified a number of genes that encode proteins that are either growth factors/receptors or proteins involved in signal transduction pathways that result in stimulation of cell growth and/or cell proliferation. A group of growth factors, referred to as cytokines, are involved in a number of diverse cellular functions. These include, by example and not by way of limitation, modulation of the immune system, regulation of energy metabolism and control of growth and development. Cytokines mediate their effects via receptors expressed at the cell surface on target cells. Cytokine receptors can be divided into three separate sub groups. Type 1 (e.g. growth hormone (GH) family) receptors are characterised by four conserved cysteine residues in the amino terminal part of their extracellular domain and the presence of a conserved Trp-Ser-Xaa-Trp-Ser motif in the C-terminal part. The repeated Cys motif is also present in Type 2 (interferon family) and Type III (tumour necrosis factor family).

[0007] A further group of growth factors are involved in angiogenesis. Angiogenesis is the development of new blood vessels from an existing vascular bed and is a complex multistep process that involves the degradation of components of the extracellular matrix and then the migration, cell-division and differentiation of endothelial cells to form tubules and eventually new vessels. Angiogenesis is involved in pathological conditions such as tumour cell growth. Genes involved in angiogenesis include, by example and not by way of limitation; vascular endothelial growth factor (VEGF, VEGF B, VEGF C, VEGF D); transforming growth factor (TGFb); acidic and basic fibroblast growth factor (AFGF and bFGF); and platelet derived growth factor (FDGF).

[0008] Many receptors for growth factors and the like are membrane bound via glycosylphosphatidylinositol (GPI). GPI-anchors are post-translational modifications to proteins that add glycosylphosphatidylinositol which enable these proteins to anchor to the extracellular side of cell membranes. Typically, extracellular proteins which have a GPI anchor do not have transmembrane or cytoplasmic domains. GPI anchor proteins occur in all eulcaryotes and form a diverse variety of proteins that includes, for example, membrane associated enzymes and adhesion molecules.

[0009] Genes that are involved in signal transduction are often associated with cell membrane localised receptors which upon activation results in a signal transduction cascade leading to activation of transcription and cell proliferation. For example, the PTEN gene product is a multiple-specificity phosphatase that can antagonise phosphoinositide lipid kinases (hereinafter PI3K) by degrading phosphoinositide (PI) (3,4,5) P3 back to PI(4,5)P2 in addition to its ability to dephosphorylate a range of protein targets such as focal adhesion kinase OAK). Phosphoinositides have been implicated in a variety of cellular processes as diverse as vacuolar protein sorting, cytoskeletal remodelling and mediating intracellular signalling events through which growth factors, hormones and neurotransmitters exert their physiological effects on cellular activity, proliferation and differentiation.

### Extracellular Matrix Associated

[0010] The array analysis has identified a number of genes that encode proteins that are extracellular matrix proteins. The Extracellular Matrix (ECM) is a complex mixture of non-living material which surrounds cells in multicellular organisms. In vertebrates the ECM comprises a mixture of protein and carbohydrate (and minerals in the example of bone). The protein component comprises proteins and glycoproteins proteins that are modified by the addition of sugar moieties) such as collagens (collagens I-XII); laminins which are found in the basal lamina a structure to which epithelial cells associate; fibronectin which functions to bind cells to the ECM; and elastins which provide skin with the flexibility. Proteoglycans are also found in the ECM and these glycoproteins comprise more carbohydrate than protein. Several sugars are added to proteoglycans the most abundant of which is acetylglucosamine. Many proteoglycans are sulphated, for example chondroitin sulphate, heparan sulphate, keratin sulphate and hyaluronic acid.

[0011] Most vertebrate cells cannot survive unless associated with the ECM and the loss of anchorage to the ECM is often associated with cell transformation in cancer. Cells attach to the ECM via anchoring molecules expressed by the cell called intergrins which bind the ECM via collagen, laminins and fibronectin. Integrins are cell membrane proteins that bind the extracellular matrix via their extracellular domain which projects from the cell surface. The integrin intracellular domain contacts the actin filaments of the cytoskeleton. In cancer metastasis the primary cancer cell becomes motile and is able to metastase (transfer) to other tissues to form secondary cancers. It is the secondary cancer that eventually kills the subject. In order to metastase the cancer cell has to penetrate the basement membrane of the tissue to gain access to the blood and lymph systems which transports the cancer cell around the body. The degradation of the ECM around a tumour is mainly catalysed by metalloproteases (MMP) which are secreted by stromal cells that surround the tumour. There is increasing evidence that cancer cells stimulate MMP production by fibroblasts by the paracrine secretion of hormones.

[0012] MMP's are an expanding group of proteases that can be classified into 3 groups. Group 1 includes collagenases that degrade connective tissue collagen, for example MMP-1, MMP-8 and MMP-13; group 2 includes gelatinases that degrade basement membrane collagens and include MMP-2 and MMP-9; a third group includes the stromelysins that degrade ECM proteoglycans, laminin and fibronectin and include MMP-10 and M-11. The activity of MMP's can be enhanced by pro-inflammatory cytokines such as IL-1 and TNFα.

### Transcription Factors/Transcription Related

[0013] The array analysis has identified a number of genes that encode proteins that are transcription factor proteins or proteins that are related to transcription.

[0014] Transcription factors are proteins that bind to DNA enhancer or promoter elements. Often these are near to the start of transcription of a gene. Transcription factors either inhibit or facilitate RNA polymerase transcription initiation and also the maintenance of an active transcription complex. Transcription factors contain two basic functional domains. A transactivation domain which is a region of the protein which interacts with other parts of the transcription machinery, for example the RNA polymerase or other transcription factors; and a DNA binding domain which comprises amino acids which recognise specific bases within the promoter region of the gene. In some examples enhancer elements can be positioned at a distance from the start of transcription or even within introns, Lewin B, 1994. Genes V, Oxford University Press, Oxford. Frequently DNA binding domains interact with nucleotide sequences or motifs which are sites to which the transcription factor binds to enhance or repress transcription.

[0015] An important family of the transcription factors comprises the homeodomain proteins. This family of transcription factors is characterised by the so-called homeodomain region which consists of 16 amino acids arranged in a helix-turn-helix conformation. Some transcription factors have both a homeodomain and a second DNA-binding region. In some examples, the region that comprises the homeodomain and the second DNA-binding region is called the POU domain.

[0016] A further example of a family of transcription factors which contain a conserved binding domain is the helix-loop-helix domain. The muscle specific transcription factor MyoD contains this motif, as do several D. melanogaster proteins that determine the cell fate in the D. melanogaster peripheral nervous system.

[0017] A related family of transcription factors are referred to as the basic leucine zipper transcription factor family or bZip. The bZip proteins are dimers, each of whose subunits contain a basic DNA-binding domain at the carboxyl end followed closely by a helix containing several leucine residues. Examples of bZip family members are C/EBP, Ap1, and the yeast transcription factor GCN4

[0018] A large group of transcription factors are the nuclear hormone receptors. It is known that steroid hormones increase the transcription of specific groups of genes. Once the hormone has entered the cell, it binds to its specific receptor protein, converting that receptor into a conformation that is able to enter the nucleus and bind specific DNA sequence motifs. The family of steroid hormone receptors includes proteins that recognise oestrogen, progesterone, testosterone and cortisone as well as non-steroid lipids such as retinoic acid, thyroxine and vitamin D.

[0019] It is known that the way in which DNA is packaged as chromatin can influence the expression of genes. There are several levels of structural packaging of DNA leading from a double stranded helix to a mitotic chromosome, after which the DNA is some 50,000 times shorter than its extended length. Double-stranded helical DNA is wound around the structural unit of a nucleosome, comprising an octamer core composed of 4 types of histones: two each of the H2A, H2B, H3, and H4 proteins. Approximately 166 base pairs are bound to the nucleosome through electrostatic forces between the negatively charged phosphate groups in the DNA backbone and positively charged amino acids (e.g., lysine and arginine) in the histone proteins.

[0020] Nucleosomes are organised into the next structural level of the chromatin fibre, also referred to as a solenoid. Chromatin structure is not static and the regulated alteration in structure is termed ‘chromatin remodelling’. This process has been defined as any event that alters the nuclease sensitivity of a region of chromatin, and can occur independently or in concert with processes such as transcription.

[0021] Reversible acetylation of evolutionary conserved lysine residues in core histone proteins plays a critical role in transcriptional regulation, cell cycle progression, and developmental events. The steady state of histone acetylation is controlled by the enzymatic activities of multiple histone acetyltransferases (HATs) and histone deacetylases (HDACs). Histone hyperacetylation is associated with transcriptional activity while histone hypoacetylation correlates with transcriptional quiescence and so histone deacetylases can be considered as enzymatic transcriptional repressors.

[0022] In general, histone deacetylases do not target genes directly through specific DNA-binding sites. Rather, deacetylases are localized to genes targeted for repression as part of a protein complex. Other proteins that are part of this complex, termed co-repressors, are responsible for targeting the genes to be repressed. In humans, four highly homologous class I HDAC enzymes (HDAC1, HDAC2, HDAC3, and HDAC8) have been identified to date, with HDAC1, HDAC2 and HDAC3 being ubiquitously expressed in many different cell types (Yang et al., 1997 and 2002). HDAC1 and HDAC2 are the human orthologues of the yeast transcriptional regulator RPD3. Analysis of the predicted amino acid sequence of HDAC3 revealed an open reading frame of 428 amino acids with a predicted molecular mass of 49 kDa.

### DNA Replication and Repair

[0023] The array analysis has identified a number of genes that encode proteins that are involved in DNA replication or repair of DNA. DNA damage can occur through a number of agents. For example, certain wavelengths of radiation, (e.g. gamma rays or X-rays), ultraviolet rays especially UV-C rays that are absorbed strongly by DNA; highly reactive oxygen radicals produced during respiration and other metabolic processes; and chemical mutagens found in the environment which may be man made or naturally occurring.

[0024] DNA can be damaged in different ways. For example, the four bases that form DNA can be covalently modified at various positions; deamination of an amino group is a common modification resulting in a mutation of cytosine to uracil. Other modifications include mismatches, for example the conversion of thymidine to uracil, single strand breaks in the phosphate backbone of the DNA molecule and covalent crosslinks between bases which may be intra-strand or inter-strand. Several chemotherapeutic agents used in the treatment of cancer act as crosslinking agents.

[0025] The Human Genome Project which has deduced the complete DNA sequence of human DNA has identified around 130 genes thought to be involved in DNA repair and replication. Damaged or inappropriate incorporation of bases can be corrected via several mechanisms. These include direct chemical reversal or excision repair. Excision repair results in removal of the damaged base and replacement with the correct base. There are three mechanisms of excision repair utilised by cells to repair DNA damage.

[0026] Base excision repair involves the removal of the damaged base by a DNA glycosylase; removal of its deoxyribose phosphate to produce gapped DNA; replacement of the correct nucleotide by a DNA polymerase β and ligation of the strand break by a DNA ligase.

[0027] Nucleotide excision repair involves recognition of the error by one or more protein factors; separating the DNA strands to produce a “bubble” by an enzyme called transcription factor IIH; scission at the 5′ and 3′ sides of the damaged area; replacement synthesis of the damaged area by DNA polymerases ε and σ; and ligation of the strand break by a DNA ligase.

[0028] Mismatch repair corrects mismatches in normal bases. The correction of mismatches utilises enzymes involved in base excision repair and proteins that recognise the mismatch for example proteins encoded by MSH2 and scission around the mismatch by MLH 1 and other proteins. A mutation in either of these genes has been associated with an inherited form of colon cancer. The repair of the mismatch is completed by the DNA polymerases ε and σ.

[0029] In addition the repair of single and double strand breaks in DNA also involves a number of proteins. The repair of single strand breaks utilises many of the proteins involved in base excision repair. A double strand break is repaired either by direct ligation of the free ends of the break or by homologous recombination. Errors in direct ligation are associated with certain cancers, for example Burkitt's lymphoma and B-cell leukaemia. The BRCA-1 and BRCA-2 genes function in homologous recombination and mutations in these genes are associated with breast and ovarian cancer.

[0030] We have conducted gene array analysis to identify genes that are characteristic of cancer stem cells which show an up regulation when compared to control stem cell samples from normal or benign stem cell populations. We herein disclose these genes and their use in the identification of therapeutic agents useful in the treatment of cancer, in particular prostate cancer, and in the development of diagnostic assays for the detection of the early on set of tumour cell growth. The present disclosure relates to the identification of cancer stem cell specific genes.

### STATEMENTS OF INVENTION

[0031] According to a first aspect of the invention there is provided agent that modulates the activity of a cancer stem cell specific nucleic acid molecule, or a polypeptide encoded by a cancer stem nucleic acid molecule, wherein said cancer cell specific nucleic acid molecule is selected from the group consisting of:
[0032] i) a nucleic acid molecule consisting of a nucleic acid sequence as represented in SEQ ID NO: 1-452;
[0033] ii) a nucleic acid molecule consisting of a nucleic acid sequence as represented in Table 1 by Genbank accession number;
[0034] iii) a nucleic acid molecule that hybridises under stringent hybridisation conditions to the nucleic acid molecule in (i) or (ii) above and which encodes a polypeptide wherein said polypeptide is stem cell specific, characterised in that said agent is for use as a pharmaceutical.

[0035] Hybridization of a nucleic acid molecule occurs when two complementary nucleic acid molecules undergo an amount of hydrogen bonding to each other. The stringency of hybridization can vary according to the environmental conditions surrounding the nucleic acids, the nature of the hybridization method, and the composition and length of the nucleic acid molecules used. Calculations regarding hybridization conditions required for attaining particular degrees of stringency are discussed in Sambrook et al., Molecular Cloning: A Laboratory Manual (Cold Spring Harbor Laboratory Press, Cold Spring Harbor, N.Y., 2001); and Tijssen, Laboratory Techniques in Biochemistry and Molecular Biology—Hybridization with Nucleic Acid Probes Part I, Chapter 2 (Elsevier, New York, 1993). The Tₘ is the temperature at which 50% of a given strand of a nucleic acid molecule is hybridized to its complementary strand. The following is an exemplary set of hybridization conditions and is not limiting:

Very High Stringency (Allows Sequences that Share at Least 90% Identity to Hybridize)

[0036] Hybridization: 5×SSC at 65° C. for 16 hours

[0037] Wash twice: 2×SSC at room temperature (RT) for 15 minutes each

[0038] Wash twice: 0.5×SSC at 65° C. for 20 minutes each

High Stringency (Allows Sequences that Share at Least 80% Identity to Hybridize)

[0039] Hybridization: 5×-6×SSC at 65° C.-70° C. for 16-20 hours

[0040] Wash twice: 2×SSC at RT for 5-20 minutes each

[0041] Wash twice: 1×SSC at 55° C.-70° C. for 30 minutes each

Low Stringency (Allows Sequences that Share at Least 50% Identity to Hybridize)

[0042] Hybridization: 6×SSC at RT to 55° C. for 16-20 hours

[0043] Wash at least twice: 2×-3×SSC at RT to 55° C. for 20-30 minutes each.

[0044] In a preferred embodiment of the invention said agent is an antagonist. Alternatively, said agent is an agonist.

[0045] According to a further aspect of the invention there is provided an agent that modulates the activity of a polypeptide comprising an amino acid sequence encoded by a nucleic acid molecule selected from the group consisting of:
[0046] i) a nucleic acid molecule as represented in SEQ ID NO: 1-452,
[0047] ii) a nucleic acid molecule that encodes a variant polypeptide wherein said variant polypeptide is modified by addition, deletion or substitution of at least one amino acid residue of the amino acid sequence encoded by a nucleic acid sequence selected from the group consisting of SEQ ID NO: 1-452 wherein said polypeptide is stem cell specific;
[0048] iii) a nucleic acid molecule that encodes a polypeptide consisting of an amino acid sequence as represented in Table 1 by Genbank accession number; characterised in that said agent is for use as a pharmaceutical.

[0049] A variant polypeptide may differ in amino acid sequence by one or more substitutions, additions, deletions, truncations which may be present in any combination. Among preferred variants are those that vary from a reference polypeptide by conservative amino acid substitutions. Such substitutions are those that substitute a given amino acid by another amino acid of like characteristics. The following non-limiting list of amino acids are considered conservative replacements (similar): a) alanine, serine, and threonine; b) glutamic acid and asparatic acid; c) asparagine and glutamine d) arginine and lysine; e) isoleucine, leucine, methionine and valine and f) phenylalanine, tyrosine and tryptophan.

[0050] In addition, the invention features polypeptide sequences having at least 75% identity with the polypeptide sequences as herein disclosed, or fragments and functionally equivalent polypeptides thereof. In one embodiment, the polypeptides have at least 85% identity, more preferably at least 90% identity, even more preferably at least 95% identity, still more preferably at least 97% identity, and most preferably at least 99% identity with the amino acid sequence illustrated herein.

[0051] In a preferred embodiment of the invention said agent is a polypeptide. Preferably said polypeptide is an antibody or an active binding part of an antibody.

[0052] In a preferred embodiment of the invention said antibody is a monoclonal antibody or active binding part thereof.

[0053] In a preferred embodiment of the invention said antibody is a chimeric antibody or a humanised antibody produced by recombinant methods to contain the variable region of said antibody with an invariant or constant region of a human antibody.

[0054] Chimeric antibodies are recombinant antibodies in which all of the V-regions of a mouse or rat antibody are combined with human antibody C-regions. Humanised antibodies are recombinant hybrid antibodies which fuse the complimentarity determining regions from a rodent antibody V-region with the framework regions from the human antibody V-regions. The complimentarily determining regions (CDRs) are the regions within the N-terminal domain of both the heavy and light chain of the antibody to where the majority of the variation of the V-region is restricted. These regions form loops at the surface of the antibody molecule. These loops provide the binding surface between the antibody and antigen. Antibodies from non-human animals provoke an immune response to the foreign antibody and its removal from the circulation. Both chimeric and humanised antibodies have reduced antigenicity when injected to a human subject because there is a reduced amount of rodent (i.e. foreign) antibody within the recombinant hybrid antibody, while the human antibody regions do not illicit an immune response. This results in a weaker immune response and a decrease in the clearance of the antibody. This is clearly desirable when using therapeutic antibodies in the treatment of human diseases. Humanised antibodies are designed to have less “foreign” antibody regions and are therefore thought to be less immunogenic than chimeric antibodies.

[0055] In a preferred embodiment of the invention said agent is an antibody fragment.

[0056] Various fragments of immunoglobulin or antibodies are known in the art, i.e., Fab, Fab₂, F(ab′)₂, Fv, Fc, Fd, scFvs, etc. A Fab fragment is a multimeric protein consisting of the immunologically active portions of an immunoglobulin heavy chain variable region and an immunoglobulin light chain variable region, covalently coupled together and capable of specifically binding to an antigen. Fab fragments are generated via proteolytic cleavage (with, for example, papain) of an intact immunoglobulin molecule. A Fab₂ fragment comprises two joined Fab fragments. When these two fragments are joined by the immunoglobulin hinge region, a F(ab′)₂ fragment results. An Fv fragment is multimeric protein consisting of the immunologically active portions of an immunoglobulin heavy chain variable region and an immunoglobulin light chain variable region covalently coupled together and capable of specifically binding to an antigen. A fragment could also be a single chain polypeptide containing only one light chain variable region, or a fragment thereof that contains the three CDRs of the light chain variable region, without an associated heavy chain variable region, or a fragment thereof containing the three CDRs of the heavy chain variable region, without an associated light chain moiety; and multi specific antibodies formed from antibody fragments, this has for example been described in U.S. Pat. No. 6,248,516. Fv fragments or single region (domain) fragments are typically generated by expression in host cell lines of the relevant identified regions. These and other immunoglobulin or antibody fragments are within the scope of the invention and are described in standard immunology textbooks such as Paul, Fundamental Immunology or Janeway et al. Immunobiology (cited above). Molecular biology now allows direct synthesis (via expression in cells or chemically) of these fragments, as well as synthesis of combinations thereof.

[0057] It is possible to create single variable regions, so called single chain antibody variable region fragments (scFv's). If a hybridoma exists for a specific monoclonal antibody it is well within the knowledge of the skilled person to isolate scFv's from mRNA extracted from said hybridoma via RT PCR. Alternatively, phage display screening can be undertaken to identify clones expressing scfv's. Alternatively said fragments are “domain antibody fragments”. Domain antibodies are the smallest binding part of an antibody (approximately 13 kDa). Examples of this technology is disclosed in U.S. Pat. No. 6,248,516, U.S. Pat. No. 6,291,158, U.S. Pat. No. 6,127,197 and EP0368684 which are all incorporated by reference in their entirety.

[0058] In a preferred method of the invention said antibody fragment is a single chain antibody variable region fragment.

[0059] A fragment of an antibody or immunoglobulin can also have bispecific function binding two different epitopes of two different antigens.

[0060] Preferably said chimeric/humanised monoclonal antibody to said polypeptide is produced as a fusion polypeptide in an expression vector suitably adapted for transfection or transformation of prolcaryotic or eukaryotic cells.

[0061] In a further preferred embodiment of the invention said antibodies are opsonic antibodies.

[0062] Phagocytosis is mediated by macrophages and polymorphic leukocytes and involves the ingestion and digestion of micro-organisms, damaged or dead cells, cell debris, insoluble particles and activated clotting factors. Opsonins are agents which facilitate the phagocytosis of the above foreign bodies. Opsonic antibodies are therefore antibodies which provide the same function. Examples of opsonins are the Fe portion of an antibody or compliment C3.

[0063] Preferably, said antibody is provided with a marker including a conventional label or tag, for example a radioactive and/or fluorescent and/or epitope label or tag.

[0064] In an alternative preferred embodiment of the invention said antibody, or antibody fragment had associated therewith or crosslinked thereto a therapeutic agent. Preferably said therapeutic agent is a chemotherapeutic agent.

[0065] Preferably said agent is selected from the group consisting of: cisplatin; carboplatin; cyclosphosphamide; melphalan; carmusline; methotrexate; 5-fluorouracil; cytarabine; mercaptopurine; daunorubicin; doxorubicin; epirubicin; vinblastine; vincristine; dactinomycin; mitomycin C; taxol; L-asparaginase; G-CSF; etoposide; colchicine; derferoxamine mesylate; and camptothecin.

[0066] In an alternative preferred embodiment of the invention said agent is a nucleic acid molecule. For example, an antisense nucleic acid; an aptamer; or a small interfering RNA.

[0067] In a preferred embodiment of the invention said nucleic acid molecule is a small interfering RNA.

[0068] A technique to specifically ablate gene function is through the introduction of double stranded RNA, also referred to as small inhibitory or interfering RNA (siRNA), into a cell which results in the destruction of mRNA complementary to the sequence included in the siRNA molecule. The siRNA molecule comprises two complementary strands of RNA (a sense strand and an antisense strand) annealed to each other to form a double stranded RNA molecule. The siRNA molecule is typically derived from exons of the gene which is to be ablated.

[0069] The mechanism of RNA interference is being elucidated. Many organisms respond to the presence of double stranded RNA by activating a cascade that leads to the formation of siRNA. The presence of double stranded RNA activates a protein complex comprising RNase III which processes the double stranded RNA into smaller fragments (siRNAs, approximately 21-29 nucleotides in length) which become part of a ribonucleoprotein complex. The siRNA acts as a guide for the RNase complex to cleave mRNA complementary to the antisense strand of the siRNA thereby resulting in destruction of the mRNA.

[0070] According to a further aspect of the invention there is provided a pharmaceutical composition comprising an agent according to the invention.

[0071] According to a further aspect of the invention there is provided a composition comprising a nucleic acid molecule selected from the group consisting of:
[0072] i) a nucleic acid molecule consisting of a nucleic acid sequence as represented in SEQ ID NO: 1-452;
[0073] ii) a nucleic acid molecule consisting of a nucleic acid sequence as represented in Table 1 by Genbank accession number;
[0074] iii) a nucleic acid molecule that hybridises under stringent hybridisation conditions to the nucleic acid molecule in (i) or (ii) above and which encodes a polypeptide wherein said polypeptide is stem cell specific.

[0075] According to a further aspect of the invention there is provided a composition comprising a polypeptide comprising an amino acid sequence selected from the group consisting of:
[0076] i) a polypeptide comprising an amino acid sequence as represented in Table 1 by Genbank accession number, or a variant polypeptide wherein said variant is modified by addition, deletion or substitution of at least one amino acid residue of the amino acid sequence presented in Table 1 by Genbank accession number;
[0077] ii) a polypeptide comprising an amino acid sequence encoded by a nucleic acid molecule comprising a nucleic acid sequence as represented in SEQ ID NO 1-452;
[0078] iii) a polypeptide comprising an amino acid sequence encoded by a nucleic acid molecule that hybridises under stringent hybridisation conditions to the nucleic acid molecule in (ii) above and which encodes a polypeptide wherein said polypeptide is stem cell specific wherein said composition is for use as a vaccine.

[0079] In a preferred embodiment of the invention said composition includes an adjuvant and/or a carrier.

[0080] An adjuvant is a substance or procedure that augments specific immune responses to antigens by modulating the activity of immune cells. Examples of adjuvants include, by example only, Freunds adjuvant, muramyl dipeptides, liposomes. A carrier is an immunogenic molecule which, when bound to a second molecule, augments immune responses to the latter. Some antigens are not intrinsically immunogenic yet may be capable of generating antibody responses when associated with a foreign protein molecule such as keyhole-limpet haemocyanin or tetanus toxoid. Such antigens contain B-cell epitopes but no T cell epitopes. The protein moiety of such a conjugate (the “carrier” protein) provides T-cell epitopes which stimulate helper T-cells that in turn stimulate antigen-specific B-cells to differentiate into plasma cells and produce antibody against the antigen. Helper T-cells can also stimulate other immune cells such as cytotoxic T-cells, and a carrier can fulfill an analogous role in generating cell-mediated immunity as well as antibodies.

[0081] When administered, the therapeutic compositions of the present invention are administered in pharmaceutically acceptable preparations. Such preparations may routinely contain pharmaceutically acceptable concentrations of salt, buffering agents, preservatives, compatible carriers, supplementary immune potentiating agents such as adjuvants and cytokines and optionally other therapeutic agents (for example, cisplatin; carboplatin; cyclosphosphamide; melphalan; carmusline; methotrexate; 5-fluorouracil; cytarabine; mercaptopurine; daunorubicin; doxorubicin; epirubicin; vinblastine; vincristine; dactinomycin; mitomycin C; taxol; L-asparaginase; G-CSF; etoposide; colchicine; derferoxamine mesylate; and camptothecin.

[0082] The therapeutics of the invention can be administered by any conventional route, including injection or by gradual infusion over time. The administration may, for example, be oral, intravenous, intraperitoneal, intramuscular, intracavity, subcutaneous, or transdermal. When antibodies are used therapeutically, a preferred route of administration is by pulmonary aerosol. Techniques for preparing aerosol delivery systems containing antibodies are well known to those of skill in the art. Generally, such systems should utilize components which will not significantly impair the biological properties of the antibodies, such as the paratope binding capacity (see, for example, Sciarra and Cutie, “Aerosols,” in Remington's Pharmaceutical Sciences, 18th edition, 1990, pp 1694-1712; incorporated by reference). Those of skill in the art can readily determine the various parameters and conditions for producing antibody aerosols without resort to undue experimentation.

[0083] The compositions of the invention are administered in effective amounts. An “effective amount” is that amount of a composition that alone, or together with further doses, produces the desired response. In the case of treating a particular disease, such as cancer, the desired response is inhibiting the progression of the disease. This may involve only slowing the progression of the disease temporarily, although more preferably, it involves halting the progression of the disease permanently. This can be monitored by routine methods or can be monitored according to diagnostic methods of the invention discussed herein.

[0084] Such amounts will depend, of course, on the particular condition being treated, the severity of the condition, the individual patient parameters including age, physical condition, size and weight, the duration of the treatment, the nature of concurrent therapy (if any), the specific route of administration and like factors within the knowledge and expertise of the health practitioner. These factors are well known to those of ordinary skill in the art and can be addressed with no more than routine experimentation. It is generally preferred that a maximum dose of the individual components or combinations thereof be used, that is, the highest safe dose according to sound medical judgment. It will be understood by those of ordinary skill in the art, however, that a patient may insist upon a lower dose or tolerable dose for medical reasons, psychological reasons or for virtually any other reasons.

[0085] The pharmaceutical compositions used in the foregoing methods preferably are sterile and contain an effective amount of antibody or nucleic acid for producing the desired response in a unit of weight or volume suitable for administration to a patient. The response can, for example, be measured by determining the signal transduction enhanced or inhibited by the composition via a reporter system, by measuring downstream effects such as gene expression, or by measuring the physiological effects of the composition. Likewise, the effects of antisense/siRNA molecules can be readily determined by measuring expression of the individual genes in cells to which an antisense/siRNA composition is added. Other assays will be known to one of ordinary skill in the art and can be employed for measuring the level of the response.

[0086] The doses of antibody or nucleic acid administered to a subject can be chosen in accordance with different parameters, in particular in accordance with the mode of administration used and the state of the subject. Other factors include the desired period of treatment. In the event that a response in a subject is insufficient at the initial doses applied, higher doses (or effectively higher doses by a different, more localized delivery route) may be employed to the extent that patient tolerance permits.

[0087] In general, doses of antibody are formulated and administered in doses between 1 ng and 1 mg, and preferably between 10 ng and 100 μg, according to any standard procedure in the art. Where nucleic acids or variants thereof are employed, doses of between 1 ng and 0.1 mg generally will be formulated and administered according to standard procedures. Other protocols for the administration of the compositions will be known to one of ordinary skill in the art, in which the dose amount, schedule of injections, sites of injections, mode of administration (e.g., intra-bone) and the like vary from the foregoing. Administration of the compositions to mammals other than humans, (e.g. for testing purposes or veterinary therapeutic purposes), is carried out under substantially the same conditions as described above. A subject, as used herein, is a mammal, preferably a human, and including a non-human primate, cow, horse, pig, sheep, goat, dog, cat or rodent.

[0088] When administered, the pharmaceutical preparations of the invention are applied in pharmaceutically-acceptable amounts and in pharmaceutically-acceptable compositions. The term “pharmaceutically acceptable” means a non-toxic material that does not interfere with the effectiveness of the biological activity of the active ingredients. Such preparations may routinely contain salts, buffering agents, preservatives, compatible carriers, and optionally other therapeutic agents. When used in medicine, the salts should be pharmaceutically acceptable, but non-pharmaceutically acceptable salts may conveniently be used to prepare pharmaceutically-acceptable salts thereof and are not excluded from the scope of the invention. Such pharmacologically and pharmaceutically-acceptable salts include, but are not limited to, those prepared from the following acids: hydrochloric, hydrobromic, sulfuric, nitric, phosphoric, maleic, acetic, salicylic, citric, formic, malonic, succinic, and the like. Also, pharmaceutically-acceptable salts can be prepared as alkaline metal or alkaline earth salts, such as sodium, potassium or calcium salts.

[0089] Pharmaceutical compositions may be combined, if desired, with a pharmaceutically-acceptable carrier. The term “pharmaceutically-acceptable carrier” as used herein means one or more compatible solid or liquid fillers, diluents or encapsulating substances which are suitable for administration into a human. The term “carrier” denotes an organic or inorganic ingredient, natural or synthetic, with which the active ingredient is combined to facilitate the application. The components of the pharmaceutical compositions also are capable of being co-mingled with the molecules of the present invention, and with each other, in a manner such that there is no interaction which would substantially impair the desired pharmaceutical efficacy.

[0090] The pharmaceutical compositions may contain suitable buffering agents, including: acetic acid in a salt; citric acid in a salt; boric acid in a salt; and phosphoric acid in a salt.

[0091] The pharmaceutical compositions also may contain, optionally, suitable preservatives, such as: benzalkonium chloride; chlorobutanol; parabens and thimerosal.

[0092] The pharmaceutical compositions may conveniently be presented in unit dosage form and may be prepared by any of the methods well-known in the art of pharmacy. All methods include the step of bringing the active agent into association with a carrier which constitutes one or more accessory ingredients. In general, the compositions are prepared by uniformly and intimately bringing the active compound into association with a liquid carrier, a finely divided solid carrier, or both, and then, if necessary, shaping the product.

[0093] Compositions suitable for oral administration may be presented as discrete units, such as capsules, tablets, lozenges, each containing a predetermined amount of the active compound. Other compositions include suspensions in aqueous liquids or non-aqueous liquids such as syrup, elixir or an emulsion.

[0094] Compositions suitable for parenteral administration conveniently comprise a sterile aqueous or non-aqueous preparation of antibody or nucleic acids, which is preferably isotonic with the blood of the recipient. This preparation may be formulated according to known methods using suitable dispersing or wetting agents and suspending agents. The sterile injectable preparation also may be a sterile injectable solution or suspension in a non-toxic parenterally-acceptable diluent or solvent, for example, as a solution in 1,3-butane diol. Among the acceptable vehicles and solvents that may be employed are water, Ringer's solution, and isotonic sodium chloride solution. In addition, sterile, fixed oils are conventionally employed as a solvent or suspending medium. For this purpose any bland fixed oil may be employed including synthetic mono- or di-glycerides. In addition, fatty acids such as oleic acid may be used in the preparation of injectables. Carrier formulation suitable for oral, subcutaneous, intravenous, intramuscular, etc. administrations can be found in Remington's Pharmaceutical Sciences, Mack Publishing Co., Easton, Pa.

[0095] According to a further aspect of the invention there is provided a vector which is adapted for the expression of the humanised or chimeric antibodies according to the invention.

[0096] According to an aspect of the invention there is provided a cell which has been transformed or transfected with the vector encoding the humanised or chimeric antibody according to the invention

[0097] According to a further aspect of the invention there is provided a method for the production of the humanised or chimeric antibody according to the invention comprising:
[0098] (i) providing a cell transformed or transfected with a vector which comprises a nucleic acid molecule encoding the humanised or chimeric antibody according to the invention;
[0099] (ii) growing said cell in conditions conducive to the manufacture of said antibody; and
[0100] (iii) purifying said antibody from said cell, or its growth environment.

[0101] In a yet further aspect of the invention there is provided a hybridoma cell line which produces a monoclonal antibody as hereinbefore described.

[0102] In a further aspect of the invention there is provided a method of producing monoclonal antibodies according to the invention using hybridoma cell lines according to the invention.

[0103] In a further aspect of the invention there is provided a method for preparing a hybridoma cell-line producing monoclonal antibodies according to the invention comprising the steps of:
[0104] i) immunizing an immunocompetent mammal with an immunogen comprising at least one polypeptide having the amino acid sequence as represented in Table 1 by Genbank accession number, or fragments thereof or at least one polypeptide encoded by a nucleic acid molecule as represented in SEQ ID NO 1-452;
[0105] ii) fusing lymphocytes of the immunised immunocompetent mammal with myeloma cells to form hybridoma cells;
[0106] iii) screening monoclonal antibodies produced by the hybridoma cells of step (ii) for binding activity to the polypeptide of (i);
[0107] iv) culturing the hybridoma cells to proliferate and/or to secrete said monoclonal antibody; and
[0108] v) recovering the monoclonal antibody from the culture supernatant.

[0109] Preferably, the said immunocompetent mammal is a mouse. Alternatively, said immunocompetent mammal is a rat.

[0110] The production of monoclonal antibodies using hybridoma cells is well-known in the art. The methods used to produce monoclonal antibodies are disclosed by Kohler and Milstein in Nature 256, 495-497 (1975) and also by Donillard and Hoffman, “Basic Facts about Hybridomas” in Compendium of Immunology V.II ed. by Schwartz, 1981, which are incorporated by reference.

[0111] According to a further aspect of the invention there is provided a diagnostic assay for the determination of cancer in a subject comprising the steps of:
[0112] i) providing an isolated cell sample;
[0113] ii) contacting the sample in (i) with a binding agent(s) that bind to a nucleic acid molecule as represented by the nucleic acid sequence in SEQ ID NO 1-452;
[0114] iii) determining the expression of said nucleic acid molecule in said sample when compared to a normal matched control sample.

[0115] In a preferred embodiment of the invention said binding agent(s) is an oligonucleotide primer. Preferably said assay is a polymerase chain reaction.

[0116] In an alternative preferred embodiment of the invention said binding agent is an antibody that specifically binds a polypeptide encoded by a nucleic acid molecule as represented in SEQ ID NO 1-452, or a polypeptide variant comprising an amino acid sequence that varies from a reference amino acid sequence by addition, deletion or substitution of at least one amino acid residue.

[0117] In a preferred embodiment of the invention said cancer is prostate cancer.

[0118] According to a further aspect of the invention there is provided a kit comprising a binding agent specifically reactive with a nucleic acid molecule as represented by the nucleic acid sequence in SEQ ID NO 1-452, or an agent specifically reactive with a polypeptide comprising an amino acid sequence encoded by a nucleic acid molecule comprising a nucleic acid sequence as represented in SEQ ID NO 1-452.

[0119] In a preferred embodiment of the invention said kit further comprises an oligonucleotide or antibody specifically reactive with said nucleic acid molecule or said polypeptide.

[0120] Preferably said kit comprises a thermostable DNA polymerase and components required for conducting the amplification of nucleic acid. Preferably said kit includes a set of instructions for conducting said polymerase chain reaction and control nucleic acid.

[0121] In an alternative preferred embodiment of the invention said kit comprises an antibody specifically reactive with a polypeptide comprising an amino acid sequence encoded by a nucleic acid sequence as represented in SEQ ID NO 1-452.

[0122] Preferably said kit comprises components required for conducting an immunoassay including, for example, a secondary antibody specifically reactive with a primary antibody that specifically binds said polypeptide(s) and enzyme reagents required to detect the binding of said secondary antibody with said primary antibody.

[0123] According to a further aspect of the invention there is provided a method to screen for an agent that modulates the activity of a polypeptide encoded by a nucleic acid molecule selected from the group consisting of:
[0124] a) a nucleic acid molecule comprising a nucleic acid sequence as represented in SEQ ID NO 1-452;
[0125] a) a nucleic acid molecule consisting of a nucleic acid sequence as represented in Table 1 by Genbank accession number;
[0126] b) a nucleic acid molecule that hybridises under stringent hybridisation conditions to the nucleic acid molecule in (i) or (ii) above and which encodes a polypeptide wherein said polypeptide is stem cell specific;
[0127] i) forming a preparation comprising a polypeptide, or sequence variant thereof, and at least one agent to be tested;
[0128] ii) determining the activity of said agent with respect to the activity of said polypeptide.
[0129] In a preferred method of the invention said agent is an antagonist. In an alternative preferred method of the invention said agent is an agonist.

[0130] Agents identified by the screening method of the invention include, antibodies, siRNA, aptamers, small organic molecules, (for example peptides, cyclic peptides), dominant negative variants of the polypeptides herein disclosed.

[0131] As mentioned above, the invention also provides, in certain embodiments, “dominant negative” polypeptides derived from the polypeptides herein disclosed. A dominant negative polypeptide is an inactive variant of a protein, which, by interacting with the cellular machinery, displaces an active protein from its interaction with the cellular machinery or competes with the active protein, thereby reducing the effect of the active protein. For example, a dominant negative receptor which binds a ligand but does not transmit a signal in response to binding of the ligand can reduce the biological effect of expression of the ligand. Likewise, a dominant negative catalytically-inactive kinase which interacts normally with target proteins but does not phosphorylate the target proteins can reduce phosphorylation of the target proteins in response to a cellular signal. Similarly, a dominant negative transcription factor which binds to another transcription factor or to a promoter site in the control region of a gene but does not increase gene transcription can reduce the effect of a normal transcription factor by occupying promoter binding sites without increasing transcription.

[0132] It will be apparent to one skilled in the art that modification to the amino acid sequence of peptides agents could enhance the binding and/or stability of the peptide with respect to its target sequence. In addition, modification of the peptide may also increase the in vivo stability of the peptide thereby reducing the effective amount of peptide necessary to inhibit the activity of the polypeptides herein disclosed. This would advantageously reduce undesirable side effects which may result in vivo. Modifications include, by example and not by way of limitation, acetylation and amidation. Alternatively or preferably, said modification includes the use of modified amino acids in the production of recombinant or synthetic forms of peptides. It will be apparent to one skilled in the art that modified amino acids include, for example, 4-hydroxyproline, 5-hydroxylysine, N⁶-acetyllysine, N⁶-methyllysine, N⁶,N⁶-dimethyllysine, N⁶,N⁶,N⁶-trimethyllysine, cyclohexyalanine, D-amino acids, ornithine. Other modifications include amino acids with a C₂, C₃ or C₄ alkyl R group optionally substituted by 1, 2 or 3 substituents selected from halo (e.g. F, Br, I), hydroxy or C₁-C₄ alkoxy. It will also be apparent to one skilled in the art that peptides which retain p53 binding activity could be modified by cyclisation. Cyclisation is known in the art, (see Scott et al Chem Biol (2001), 8:801-815; Gellerman et al J. Peptide Res (2001), 57: 277-291; Dutta et al J. Peptide Res (2000), 8: 398-412; Ngoka and Gross J Amer Soc Mass Spec (1999), 10:360-363.

[0133] According to a further aspect of the invention there is provided a method to treat a subject for a cancer comprising administering an effective amount of an agent according to the invention.

[0134] In a preferred method of the invention said subject is human.

[0135] In a preferred method of the invention said cancer is prostate cancer.

[0136] According to a further aspect of the invention there is provided a method to immunize an animal against a cancerous condition comprising administering an effective amount of a nucleic acid or polypeptide encoded by a nucleic acid molecule selected from the group consisting of according to the invention.

[0137] In a preferred method of the invention said animal is a human.

[0138] In a further preferred embodiment of the invention said cancer is prostate cancer.

[0139] As used herein, the term “cancer” refers to cells having the capacity for autonomous growth, i.e., an abnormal state or condition characterized by rapidly proliferating cell growth. The term is meant to include all types of cancerous growths or oncogenic processes, metastatic tissues or malignantly transformed cells, tissues, or organs, irrespective of histopathologic type or stage of invasiveness. The term “cancer” includes malignancies of the various organ systems, such as those affecting, for example, lung, breast, thyroid, lymphoid, gastrointestinal, and genito-urinary tract, as well as adenocarcinomas which include malignancies such as most colon cancers, renal-cell carcinoma, prostate cancer and/or testicular tumours, non-small cell carcinoma of the lung, cancer of the small intestine and cancer of the esophagus. The term “carcinoma” is art recognized and refers to malignancies of epithelial or endocrine tissues including respiratory system carcinomas, gastrointestinal system carcinomas, genitourinary system carcinomas, testicular carcinomas, breast carcinomas, prostatic carcinomas, endocrine system carcinomas, and melanomas. Exemplary carcinomas include those forming from tissue of the cervix, lung, prostate, breast, head and neck, colon and ovary. The term “carcinoma” also includes carcinosarcomas, e.g., which include malignant tumours composed of carcinomatous and sarcomatous tissues. An “adenocarcinoma” refers to a carcinoma derived from glandular tissue or in which the tumor cells form recognizable glandular structures. The term “sarcoma” is art recognized and refers to malignant tumors of mesenchymal derivation.

[0140] Throughout the description and claims of this specification, the words “comprise” and “contain” and variations of the words, for example “comprising” and “comprises”, means “including but not limited to”, and is not intended to (and does not) exclude other moieties, additives, components, integers or steps.

[0141] Throughout the description and claims of this specification, the singular encompasses the plural unless the context otherwise requires. In particular, where the indefinite article is used, the specification is to be understood as contemplating plurality as well as singularity, unless the context requires otherwise.

[0142] Features, integers, characteristics, compounds, chemical moieties or groups described in conjunction with a particular aspect, embodiment or example of the invention are to be understood to be applicable to any other aspect, embodiment or example described herein unless incompatible therewith.

[0143] An embodiment of the invention will now be described by example only and with reference to the following Figures and Materials and Methods;

[0144] FIG. 1: Verification of CD133 as a stem cell marker of prostatic epithelia: 1A: A paraffin section of prostatic acini labelled with the nuclear stain DAPI (Blue) and anti CD133 directly conjugated to PE (Red). 1B: Basal cells with the phenotype α₂β₁^{hi}/CD133⁺ have a higher colony forming efficiency (CFE) than α₂β₁^{low}/CD133⁻. (CFE) was calculated as the number of colonies formed per number of selected cells ×100%. CFEs are expressed as the ratio of the control CFE. Results show means ±s.e.m of four experiments. 1C. Xenografts of prostate acini formed by transplantation of α₂β₁^{hi}/CD133⁺ basal cells stained with (A) Haematoxylin and Eosin, (13) 34βE12, (C) anti-K18, (D) anti-PAP (E) Anti-androgen receptor. Bar 40 μm;

[0145] FIG. 2: Characterisation of tumour ‘stem’ cells from a lymph node metastasis of the prostate (LNMP). 2A. Tumour cells selected on the basis of □₂□₁/CD133 differentiate in culture. 2B. Invasion assay activity of LNMP in comparison to PC3M and an immortalised prostate epithelial cell line, PNT1a;

[0146] FIG. 3a represents NFkB Expression from α₂^{hi}/CD133+ cells (PE434 cells; Gleason 9); FIG. 3b represents a FACS dot plot of NFkB and CD133+ expression; 84% of cells are positive for NFkB alone and 0.21% are positive for NF3 and CD133.

[0147] Table 1 summarises array analysis of prostate stem cells and prostates cancer stem cells. Genes/nucleic acid and amino acid sequences are identified by Genbank accession number which can be accessed at http://www.ncbi.nlm.nih.gov. Genes are also identified by common name. The content of each accession entry is incorporated by reference and including the amino acid sequences of individual genes.

### Materials and Methods

### Genotype of Isolated Tumour Stem Cells

[0148] Using a combination of microsatellite markers associated with sporadic prostate cancer (8p 10q 16p) we can determine whether the isolated HEA⁺/CD44⁺/α₂β₁^{hi}/CD133⁺ cells display loss of heterozygosity patterns characteristic of prostate tumours in comparison to blood lymphocyte DNA from the same patient. The analysis is carried out on a microsampling of cultures with 3 MM paper and fluorescently labelled PCR primers (MacIntosh et al., 1998). This will enable us to discriminate between normal and cancer cells and determine whether stem cells are indeed targets for transforming events.

### Proliferative, Differentiative and Malignant Potential of Putative Cancer Stem Cells

[0149] Distinct populations of tumour cells are isolated and their proliferative, differentiative and malignant potential determined in vitro and in vivo. The following populations (HEA⁺/CD44⁻ (luminal cells), HEA⁺/CD44⁺ (basal cells), HEA⁺/CD44⁺/α₂β₁^{low}/CD133⁻ (transit cells), HEA⁺/CD44⁺/α₂β₁^{hi}/CD133⁺ (stem cells) are isolated and compared with the unsorted tumour population.

### Colony Forming Efficiency (CFE): Anchorage Independent and Anchorage-Dependent Growth

[0150] The transforming potential of distinct populations (as above) of cancer cells (anchorage independence) is measured by their ability to form colonies in soft agar. Individual colonies are counted after 21 days using an inverted microscope. Comparisons are made of CFE and colony size.

### Morphogenesis in Gels of Reconstituted Basement Membrane Matrix

[0151] We have determined the potential of tumour stem cells and their progenitors to undergo glandular morphogenesis in reconstituted basement membrane (e.g. Matrigel). We have demonstrated that normal basal cells can undergo glandular morphogenesis when grown in a collagen based matrix, (e.g. Matrigel) with stroma, in the presence of androgens. Spheroids are generated which are architecturally and phenotypically similar to in vivo acini and are often branched alveolar- and duct like (Lang et al., 2001). In contrast, cancer cells often form large aggregates of spindle-shaped cells with no obvious organisation. Nonetheless, the structures will often contain cells that show some degree of differentiation and can be compared to the original tumour.

### Invasion Assays

[0152] The ability of these stem cells to migrate across Matrigel is determined by the modified Boyden-chamber method (Albini et al., 1987). Migration rates will be evaluated using time-lapse confocal microscopy, using cells labelled with EGFP. We have generated prostate epithelium expressing low levels of EGFP. Recombinant retrovirus based on pLNCX-EGFP(2) generated will be used to infect the cell populations and G418 resistant colonies will be used in motility assays. The low levels of GFP expression will be used to track invasion and motility in real time.

### In Vivo Tumourigenesis

[0153] Tumour stem cells must possess key criteria that define normal stem cells: after transplantation they must proliferate, differentiate and self-renew. To determine the ability of distinct tumour phenotypes, to colonise in vivo, grafts of stem cells, transit cells, basal cells, luminal cells and unsorted cells are introduced into the prostates of 6 to 8 week old male, immuno-compromised mice. The mice are treated hormonally at the time of grafting by subcutaneous implantation of sustained release testosterone pellets. The number of cells from each population that successfully engraft and initiate tumour proliferation is determined by varying the number of cells implanted. The self-renewal capacity of the distinct populations is determined by transplanting serially into secondary recipients.

### Array Sample and Data Processing

### Total RNA Extraction

[0154] δ₂^{high}/CD133⁺ Cells

[0155] Total RNA is extracted from up to 1×10⁴ selected cells using QIAgen RNeasy micro columns. Cells are lysed in 100 μl RLT buffer+1% β-mercaptoethanol and the manufactures protocol for “total RNA isolation from animal cells” is followed (RNeasy_Micro0403.pdf, pages 39-44, which is incorporated by reference).

### α₂^{low} Cells

[0156] Total RNA is extracted from between 1×10⁵ and 1×10⁶ selected cells using QIAgen RNeasy mini columns. Cells are lysed in 350 μl RLT buffer+1% β-mercaptoethanol and the manufactures protocol for “isolation of total RNA from animal cells” cells is followed (RNeasy_Mini0601.pdf, pages 31-35, which is incorporated by reference).

[0157] RNA yields are determined spectrophotometrically at 260 nm and RNA integrity checked by capillary electrophoresis using an Agilent 2100 bioanalyzer.

Production of Fragmented Labelled cRNA

[0158] Total RNA is amplified using two rounds of cDNA synthesis and IVT (in vitro transcription) and biotin labelled by following the Affymetrix small scale labelling protocol vII (smallv2_technote.pdf which is incorporated by reference) with the following modifications:
[0159] 1. 10-50 ng of total RNA is used per sample (step 1).
[0160] 2. T4 DNA polymerase steps in the two second strand cDNA synthesis reactions are omitted (steps 2 & 7).
[0161] 3. Second cycle, IVT for cRNA amplification and labelling (step 9) uses the Affymetrix GeneChip IVT labelling kit instead of the ENZO BioArray HighYield RNA transcript labelling kit and the Affymetrix eukaryotic sample and array processing standard protocol (expression_s2_manual-0604.pdf, section 2.1.34-2.1.35 which is incorporated by reference) is followed for this stage.

[0162] The quality of first and second round cRNA products and fragmented cRNA are checked by capillary electrophoresis using an Agilent 2100 bioanalyzer.

### Array Hybridisation

[0163] Labelled fragmented cRNA (15 μg) is hybridised to oligonucleotide probes on an Affymetrix HG-U133plus2 GeneChip. For hybridisation, washing, staining and scanning the Affymetrix eukaryotic sample and array processing standard protocol (expression_s2_manual_{—}0604.pdf, section 2.2.3-2.3.17 which is incorporated by reference) is followed.
[0164] 1. Hybridisation is conducted using an Affymetrix Hybridisation Oven 640.
[0165] 2. Washing and staining stages are conducted using an Affymetrix Fluidics Station 450 using the EukGE-WS2v5 protocol.
[0166] 3. Scanning of arrays is done with an Affymetrix Gene Scanner 3000.

### Data Processing

[0167] Scanned GeneChip images are processed using Affymetrix GCOS software to derive an intensity value and flag (present, absent or marginal) for each probe. Probe intensities are derived using the MASS algorithm.

[0168] Comparisons between different sample datasets are conducted using Agilent GeneSpring GX software. Datasets to be compared are first normalised using three steps (consecutively applied in the order given):
[0169] 1. Transform values <0.01 to 0.01
[0170] 2. Normalise each chip to the 50 percentile of the measurements taken for that chip.
[0171] 3. Normalise each probe to the median of the measurements for that probe.

[0172] For the purpose of analysing the data the following parameters are applied:
[0173] 1. All cells derived from prostate cancer specimens are classed malignant, all cells derived from BPH specimens are classed benign (“tumour type” parameter)
[0174] 2. All cells obtained by selection for high integrin α₂β₁ expression and CD133 are classed stem cells, all cells selected for low integrin α₂β₁ expression are classed committed basal cells (“cell type” parameter).
[0175] 3. Further interpretations of the data allow for the combining of the above parameters to derive the conditions: malignant stem cells, malignant committed basal cells, benign stem cells and benign committed basal cells.

[0176] Low quality and uninformative data is removed using three selections (consecutively applied in the order given):
[0177] 1. Remove probes flagged “absent” in all samples.
[0178] 2. Remove probes with standard deviation within a parameter class of >1 in at least 3 of the 4 conditions.
[0179] 3. Remove probes with less than a 2-fold overall change in normalised expression value between all four of the conditions.

### Stem Cell Markers

[0180] The invention relates to gene markers of stem cells, typically prostate stem cells, and in particular cancer stem cells, for example prostate cancer stem cells; therapeutic agents and diagnostic assays based on said stem cell genes and expression products; and including screening assays to identify therapeutic agents.

### BACKGROUND

[0181] A problem underlying the effective treatment of cancerous conditions is the identification of a population of cells in a tumour that have the ability of sustaining the growth of a tumour. The evidence suggests that tumours are clonal and are therefore derived from a single cell. However, there are few studies that identify and characterise those cells types that are responsible for maintaining tumour cell growth. Some have searched for these so called “cancer stem cells”.

[0182] We have identified CD133, which is expressed by primitive haematopoietic stem cells and developing epithelia as a further stem cell marker for prostate epithelia. CD133 cells are restricted to the α₂β₁^{hi} population (the receptor for type I collagen) and are located in the basal layer, often at the base of a budding region or branching point (FIG. 1A). α₂β₁^{hi}/CD133⁺ cells exhibit two important attributes of epithelial stem cells: they possess a high in vitro proliferative potential (FIG. 1B) and can reconstitute prostatic-like acini in immunocompromised male nude mice FIG. 1C).

[0183] In our co-pending application (WO 2005/089043) we describe the isolation of prostate stem cells which have been directly isolated from lymph node and prostate glands from a series of patient samples. These stem cells express markers that characterise the cells with stem cell properties. The following markers are typically expressed as prostate stem cell markers; human epithelial antigen (HEA), CD44, α₂β₁^{hi} and CD133. Morphologically the cells range from fibroblastoid (expressing high levels of vimentin which is typical of transformed cells) or epithelial, and are capable of producing progenitors associated with prostate epithelial differentiation. Invasion assays, using Matrigel-coated filters have determined that these cells have 2-3 fold greater capacity to invade through Matrigel than PC3M (a highly metastatic sub-line of PC3 cells).

### DESCRIPTION OF THE DISCLOSURE

[0184] We have conducted array analysis of CD133 positive prostate stem cells and compared expression of genes between CD133 positive stem cells and CD133 positive cancer stem cells.

### Growth Factors/Receptors

[0185] The array analysis has identified a number of genes that encode proteins that are either growth factors/receptors or proteins involved in signal transduction pathways that result in stimulation of cell growth and/or cell proliferation. A group of growth factors, referred to as cytokines, are involved in a number of diverse cellular functions. These include, by example and not by way of limitation, modulation of the immune system, regulation of energy metabolism and control of growth and development. Cytokines mediate their effects via receptors expressed at the cell surface on target cells. Cytokine receptors can be divided into three separate sub groups. Type 1 (e.g. growth hormone (GH) family) receptors are characterised by four conserved cysteine residues in the amino terminal part of their extracellular domain and the presence of a conserved Trp-Ser-Xaa-Trp-Ser motif in the C-terminal part. The repeated Cys motif is also present in Type 2 (interferon family) and Type III (tumour necrosis factor family).

[0186] A further group of growth factors are involved in angiogenesis. Angiogenesis is the development of new blood vessels from an existing vascular bed and is a complex multistep process that involves the degradation of components of the extracellular matrix and then the migration, cell-division and differentiation of endothelial cells to form tubules and eventually new vessels. Angiogenesis is involved in pathological conditions such as tumour cell growth. Genes involved in angiogenesis include, by example and not by way of limitation; vascular endothelial growth factor (VEGF, VEGF B, VEGF C, VEGF D); transforming growth factor (TGFb); acidic and basic fibroblast growth factor (aFGF and bFGF); and platelet derived growth factor (PDGF).

[0187] Many receptors for growth factors and the like are membrane bound via glycosylphosphatidylinositol (GPI). GPI-anchors are post-translational modifications to proteins that add glycosylphosphatidylinositol which enable these proteins to anchor to the extracellular side of cell membranes. Typically, extracellular proteins which have a GPI anchor do not have transmembrane or cytoplasmic domains. GPI anchor proteins occur in all eukaryotes and form a diverse variety of proteins that includes, for example, membrane associated enzymes and adhesion molecules.

[0188] Genes that are involved in signal transduction are often associated with cell membrane localised receptors which upon activation results in a signal transduction cascade leading to activation of transcription and cell proliferation. For example, the PTEN gene product is a multiple-specificity phosphatase that can antagonise phosphoinositide lipid kinases (hereinafter PI3K) by degrading phosphoinositide (PI) (3,4,5) P3 back to PI(4,5)P2 in addition to its ability to dephosphorylate a range of protein targets such as focal adhesion kinase (FAK). Phosphoinositides have been implicated in a variety of cellular processes as diverse as vacuolar protein sorting, cytoskeletal remodelling and mediating intracellular signalling events through which growth factors, hormones and neurotransmitters exert their physiological effects on cellular activity, proliferation and differentiation.

### Extracellular Matrix Associated

[0189] The array analysis has identified a number of genes that encode proteins that are extracellular matrix proteins. The Extracellular Matrix (ECM) is a complex mixture of non-living material which surrounds cells in multicellular organisms. In vertebrates the ECM comprises a mixture of protein and carbohydrate (and minerals in the example of bone). The protein component comprises proteins and glycoproteins (proteins that are modified by the addition of sugar moieties) such as collagens (collagens I-XII); laminins which are found in the basal lamina a structure to which epithelial cells associate; fibronectin which functions to bind cells to the ECM; and elastins which provide skin with the flexibility. Proteoglycans are also found in the ECM and these glycoproteins comprise more carbohydrate than protein. Several sugars are added to proteoglycans the most abundant of which is acetylglucosamine. Many proteoglycans are sulphated, for example chondroitin sulphate, heparan sulphate, keratin sulphate and hyaluronic acid.

[0190] Most vertebrate cells cannot survive unless associated with the ECM and the loss of anchorage to the ECM is often associated with cell transformation in cancer. Cells attach to the ECM via anchoring molecules expressed by the cell called intergrins which bind the ECM via collagen, laminins and fibronectin. Integrins are cell membrane proteins that bind the extracellular matrix via their extracellular domain which projects from the cell surface. The integrin intracellular domain contacts the actin filaments of the cytoskeleton. In cancer metastasis the primary cancer cell becomes motile and is able to metastase (transfer) to other tissues to form secondary cancers. It is the secondary cancer that eventually kills the subject. In order to metastase the cancer cell has to penetrate the basement membrane of the tissue to gain access to the blood and lymph systems which transports the cancer cell around the body. The degradation of the ECM around a tumour is mainly catalysed by metalloproteases (MMP) which are secreted by stromal cells that surround the tumour. There is increasing evidence that cancer cells stimulate MMP production by fibroblasts by the paracrine secretion of hormones.

[0191] MMP's are an expanding group of proteases that can be classified into 3 groups. Group 1 includes collagenases that degrade connective tissue collagen, for example MMP-1, MMP-8 and MMP-13; group 2 includes gelatinases that degrade basement membrane collagens and include MMP-2 and MMP-9; a third group includes the stromelysins that degrade ECM proteoglycans, laminin and fibronectin and include MMP-10 and MMP-11. The activity of MMP's can be enhanced by pro-inflammatory cytokines such as IL-1 and TNFα.

### Transcription Factors/Transcription Related

[0192] The array analysis has identified a number of genes that encode proteins that are transcription factor proteins or proteins that are related to transcription.

[0193] Transcription factors are proteins that bind to DNA enhancer or promoter elements. Often these are near to the start of transcription of a gene. Transcription factors either inhibit or facilitate RNA polymerase transcription initiation and also the maintenance of an active transcription complex. Transcription factors contain two basic functional domains. A transactivation domain which is a region of the protein which interacts with other parts of the transcription machinery, for example the RNA polymerase or other transcription factors; and a DNA binding domain which comprises amino acids which recognise specific bases within the promoter region of the gene. In some examples enhancer elements can be positioned at a distance from the start of transcription or even within introns, Lewin B, 1994. Genes V, Oxford University Press, Oxford. Frequently DNA binding domains interact with nucleotide sequences or motifs which are sites to which the transcription factor binds to enhance or repress transcription.

[0194] An important family of the transcription factors comprises the homeodomain proteins. This family of transcription factors is characterised by the so-called homeodomain region which consists of 16 amino acids arranged in a helix-turn-helix conformation. Some transcription factors have both a homeodomain and a second DNA-binding region. In some examples, the region that comprises the homeodomain and the second DNA-binding region is called the POU domain.

[0195] A further example of a family of transcription factors which contain a conserved binding domain is the helix-loop-helix domain. The muscle specific transcription factor MyoD contains this motif, as do several D. melanogaster proteins that determine the cell fate in the D. melanogaster peripheral nervous system.

[0196] A related family of transcription factors are referred to as the basic leucine zipper transcription factor family or bZip. The bZip proteins are dimers, each of whose subunits contain a basic DNA-binding domain at the carboxyl end followed closely by a helix containing several leucine residues. Examples of bZip family members are C/EBP, Ap1, and the yeast transcription factor GCN4

[0197] A large group of transcription factors are the nuclear hormone receptors. It is known that steroid hormones increase the transcription of specific groups of genes. Once the hormone has entered the cell, it binds to its specific receptor protein, converting that receptor into a conformation that is able to enter the nucleus and bind specific DNA sequence motifs. The family of steroid hormone receptors includes proteins that recognise oestrogen, progesterone, testosterone and cortisone as well as non-steroid lipids such as retinoic acid, thyroxine and vitamin D.

[0198] It is known that the way in which DNA is packaged as chromatin can influence the expression of genes. There are several levels of structural packaging of DNA leading from a double stranded helix to a mitotic chromosome, after which the DNA is some 50,000 times shorter than its extended length. Double-stranded helical DNA is wound around the structural unit of a nucleosome, comprising an octamer core composed of 4 types of histones: two each of the H2A, H2B, H3, and H4 proteins. Approximately 166 base pairs are bound to the nucleosome through electrostatic forces between the negatively charged phosphate groups in the DNA backbone and positively charged amino acids (e.g., lysine and arginine) in the histone proteins.

[0199] Nucleosomes are organised into the next structural level of the chromatin fibre, also referred to as a solenoid. Chromatin structure is not static and the regulated alteration in structure is termed ‘chromatin remodelling’. This process has been defined as any event that alters the nuclease sensitivity of a region of chromatin, and can occur independently or in concert with processes such as transcription.

[0200] Reversible acetylation of evolutionary conserved lysine residues in core histone proteins plays a critical role in transcriptional regulation, cell cycle progression, and developmental events. The steady state of histone acetylation is controlled by the enzymatic activities of multiple histone acetyltransferases (HATs) and histone deacetylases (HDACs). Histone hyperacetylation is associated with transcriptional activity while histone hypoacetylation correlates with transcriptional quiescence and so histone deacetylases can be considered as enzymatic transcriptional repressors.

[0201] In general, histone deacetylases do not target genes directly through specific DNA-binding sites. Rather, deacetylases are localized to genes targeted for repression as part of a protein complex. Other proteins that are part of this complex, termed co-repressors, are responsible for targeting the genes to be repressed. In humans, four highly homologous class I HDAC enzymes (HDAC1, HDAC2, HDAC3, and HDAC8) have been identified to date, with HDAC1, HDAC2 and HDAC3 being ubiquitously expressed in many different cell types (Yang et al., 1997 and 2002). HDAC1 and HDAC2 are the human orthologues of the yeast transcriptional regulator RPD3. Analysis of the predicted amino acid sequence of HDAC3 revealed an open reading frame of 428 amino acids with a predicted molecular mass of 49 kDa.

### DNA Replication and Repair

[0202] The array analysis has identified a number of genes that encode proteins that are involved in DNA replication or repair of DNA. DNA damage can occur through a number of agents. For example, certain wavelengths of radiation, (e.g. gamma rays or X-rays), ultraviolet rays especially UV-C rays that are absorbed strongly by DNA; highly reactive oxygen radicals produced during respiration and other metabolic processes; and chemical mutagens found in the environment which may be man made or naturally occurring.

[0203] DNA can be damaged in different ways. For example, the four bases that form DNA can be covalently modified at various positions; deamination of an amino group is a common modification resulting in a mutation of cytosine to uracil. Other modifications include mismatches, for example the conversion of thymidine to uracil, single strand breaks in the phosphate backbone of the DNA molecule and covalent crosslinks between bases which may be intra-strand or inter-strand. Several chemotherapeutic agents used in the treatment of cancer act as crosslinking agents.

[0204] The Human Genome Project which has deduced the complete DNA sequence of human DNA has identified around 130 genes thought to be involved in DNA repair and replication. Damaged or inappropriate incorporation of bases can be corrected via several mechanisms. These include direct chemical reversal or excision repair. Excision repair results in removal of the damaged base and replacement with the correct base. There are three mechanisms of excision repair utilised by cells to repair DNA damage.

[0205] Base excision repair involves the removal of the damaged base by a DNA glycosylase; removal of its deoxyribose phosphate to produce gapped DNA; replacement of the correct nucleotide by a DNA polymerase β and ligation of the strand break by a DNA ligase.

[0206] Nucleotide excision repair involves recognition of the error by one or more protein factors; separating the DNA strands to produce a “bubble” by an enzyme called transcription factor 11H; scission at the 5′ and 3′ sides of the damaged area; replacement synthesis of the damaged area by DNA polymerases ε and σ; and ligation of the strand break by a DNA ligase.

[0207] Mismatch repair corrects mismatches in normal bases. The correction of mismatches utilises enzymes involved in base excision repair and proteins that recognise the mismatch for example proteins encoded by MSH2 and scission around the mismatch by MLH 1 and other proteins. A mutation in either of these genes has been associated with an inherited form of colon cancer. The repair of the mismatch is completed by the DNA polymerases ε and σ.

[0208] In addition the repair of single and double strand breaks in DNA also involves a number of proteins. The repair of single strand breaks utilises many of the proteins involved in base excision repair. A double strand break is repaired either by direct ligation of the free ends of the break or by homologous recombination. Errors in direct ligation are associated with certain cancers, for example Burkitt's lymphoma and B-cell leukaemia. The BRCA-1 and BRCA-2 genes function in homologous recombination and mutations in these genes are associated with breast and ovarian cancer.

[0209] We have conducted gene array analysis to identify genes that are characteristic of cancer stem cells which show an up regulation when compared to control stem cell samples from normal or benign stem cell populations. We herein disclose these genes and their use in the identification of therapeutic agents useful in the treatment of cancer, in particular prostate cancer, and in the development of diagnostic assays for the detection of the early on set of tumour cell growth. The present disclosure relates to the identification of cancer stem cell specific genes.

### STATEMENTS OF INVENTION

[0210] According to a first aspect of the invention there is provided agent that modulates the activity of a cancer stem cell specific nucleic acid molecule, or a polypeptide encoded by a cancer stem nucleic acid molecule, wherein said cancer cell specific nucleic acid molecule is selected from the group consisting of:
[0211] i) a nucleic acid molecule consisting of a nucleic acid sequence as represented in SEQ ID NO: 1-452;
[0212] ii) a nucleic acid molecule consisting of a nucleic acid sequence as represented in Table 1 by Genbank accession number;
[0213] iii) a nucleic acid molecule that hybridises under stringent hybridisation conditions to the nucleic acid molecule in (i) or (ii) above and which encodes a polypeptide wherein said polypeptide is stem cell specific, characterised in that said agent is for use as a pharmaceutical.

[0214] Hybridization of a nucleic acid molecule occurs when two complementary nucleic acid molecules undergo an amount of hydrogen bonding to each other. The stringency of hybridization can vary according to the environmental conditions surrounding the nucleic acids, the nature of the hybridization method, and the composition and length of the nucleic acid molecules used. Calculations regarding hybridization conditions required for attaining particular degrees of stringency are discussed in Sambrook et al., Molecular Cloning: A Laboratory Manual (Cold Spring Harbor Laboratory Press, Cold Spring Harbor, N.Y., 2001); and Tijssen, Laboratory Techniques in Biochemistry and Molecular Biology-Hybridization with Nucleic Acid Probes Part I, Chapter 2 (Elsevier, New York, 1993). The Tₘ is the temperature at which 50% of a given strand of a nucleic acid molecule is hybridized to its complementary strand. The following is an exemplary set of hybridization conditions and is not limiting:

Very High Stringency (Allows Sequences that Share at Least 90% Identity to Hybridize)

[0215] Hybridization: 5×SSC at 65° C. for 16 hours

[0216] Wash twice: 2×SSC at room temperature (RT) for 15 minutes each

[0217] Wash twice: 0.5×SSC at 65° C. for 20 minutes each

High Stringency (Allows Sequences that Share at Least 80% Identity to Hybridize)

[0218] Hybridization: 5×-6×SSC at 65° C.-70° C. for 16-20 hours

[0219] Wash twice: 2×SSC at RT for 5-20 minutes each

[0220] Wash twice: 1×SSC at 55° C.-70° C. for 30 minutes each

Low Stringency (Allows Sequences that Share at Least 50% Identity to Hybridize)

[0221] Hybridization: 6×SSC at RT to 55° C. for 16-20 hours

[0222] Wash at least twice: 2×-3×SSC at RT to 55° C. for 20-30 minutes each.

[0223] In a preferred embodiment of the invention said agent is an antagonist. Alternatively, said agent is an agonist.

[0224] According to a further aspect of the invention there is provided an agent that modulates the activity of a polypeptide comprising an amino acid sequence encoded by a nucleic acid molecule selected from the group consisting of:
[0225] i) a nucleic acid molecule as represented in SEQ ID NO: 1-452,
[0226] ii) a nucleic acid molecule that encodes a variant polypeptide wherein said variant polypeptide is modified by addition, deletion or substitution of at least one amino acid residue of the amino acid sequence encoded by a nucleic acid sequence selected from the group consisting of SEQ ID NO: 1-452 wherein said polypeptide is stem cell specific;
[0227] iii) a nucleic acid molecule that encodes a polypeptide consisting of an amino acid sequence as represented in Table 1 by Genbank accession number; characterised in that said agent is for use as a pharmaceutical.

[0228] A variant polypeptide may differ in amino acid sequence by one or more substitutions, additions, deletions, truncations which may be present in any combination. Among preferred variants are those that vary from a reference polypeptide by conservative amino acid substitutions. Such substitutions are those that substitute a given amino acid by another amino acid of like characteristics. The following non-limiting list of amino acids are considered conservative replacements (similar): a) alanine, serine, and threonine; b) glutamic acid and asparatic acid; c) asparagine and glutamine d) arginine and lysine; e) isoleucine, leucine, methionine and valine and f) phenylalanine, tyrosine and tryptophan.

[0229] In addition, the invention features polypeptide sequences having at least 75% identity with the polypeptide sequences as herein disclosed, or fragments and functionally equivalent polypeptides thereof. In one embodiment, the polypeptides have at least 85% identity, more preferably at least 90% identity, even more preferably at least 95% identity, still more preferably at least 97% identity, and most preferably at least 99% identity with the amino acid sequence illustrated herein.

[0230] In a preferred embodiment of the invention said agent is a polypeptide. Preferably said polypeptide is an antibody or an active binding part of an antibody.

[0231] In a preferred embodiment of the invention said antibody is a monoclonal antibody or active binding part thereof.

[0232] In a preferred embodiment of the invention said antibody is a chimeric antibody or a humanised antibody produced by recombinant methods to contain the variable region of said antibody with an invariant or constant region of a human antibody.

[0233] Chimeric antibodies are recombinant antibodies in which all of the V-regions of a mouse or rat antibody are combined with human antibody C-regions. Humanised antibodies are recombinant hybrid antibodies which fuse the complimentarily determining regions from a rodent antibody V-region with the framework regions from the human antibody V-regions. The complimentarity determining regions (CDRs) are the regions within the N-terminal domain of both the heavy and light chain of the antibody to where the majority of the variation of the V-region is restricted. These regions form loops at the surface of the antibody molecule. These loops provide the binding surface between the antibody and antigen. Antibodies from non-human animals provoke an immune response to the foreign antibody and its removal from the circulation. Both chimeric and humanised antibodies have reduced antigenicity when injected to a human subject because there is a reduced amount of rodent (i.e. foreign) antibody within the recombinant hybrid antibody, while the human antibody regions do not illicit an immune response. This results in a weaker immune response and a decrease in the clearance of the antibody. This is clearly desirable when using therapeutic antibodies in the treatment of human diseases. Humanised antibodies are designed to have less “foreign” antibody regions and are therefore thought to be less immunogenic than chimeric antibodies.

[0234] In a preferred embodiment of the invention said agent is an antibody fragment.

[0235] Various fragments of immunoglobulin or antibodies are known in the art, i.e., Fab, Fab₂, F(ab′)₂, Fv, Fc, Fd, scFvs, etc. A Fab fragment is a multimeric protein consisting of the immunologically active portions of an immunoglobulin heavy chain variable region and an immunoglobulin light chain variable region, covalently coupled together and capable of specifically binding to an antigen. Fab fragments are generated via proteolytic cleavage (with, for example, papain) of an intact immunoglobulin molecule. A Fab₂ fragment comprises two joined Fab fragments. When these two fragments are joined by the immunoglobulin hinge region, a F(ab′)₂ fragment results. An Fv fragment is multimeric protein consisting of the immunologically active portions of an immunoglobulin heavy chain variable region and an immunoglobulin light chain variable region covalently coupled together and capable of specifically binding to an antigen. A fragment could also be a single chain polypeptide containing only one light chain variable region, or a fragment thereof that contains the three CDRs of the light chain variable region, without an associated heavy chain variable region, or a fragment thereof containing the three CDRs of the heavy chain variable region, without an associated light chain moiety; and multi specific antibodies formed from antibody fragments, this has for example been described in U.S. Pat. No. 6,248,516. Fv fragments or single region (domain) fragments are typically generated by expression in host cell lines of the relevant identified regions. These and other immunoglobulin or antibody fragments are within the scope of the invention and are described in standard immunology textbooks such as Paul, Fundamental Immunology or Janeway et al. Immunobiology (cited above). Molecular biology now allows direct synthesis (via expression in cells or chemically) of these fragments, as well as synthesis of combinations thereof.

[0236] It is possible to create single variable regions, so called single chain antibody variable region fragments (scFv's). If a hybridoma exists for a specific monoclonal antibody it is well within the knowledge of the skilled person to isolate scFv's from mRNA extracted from said hybridoma via RT PCR. Alternatively, phage display screening can be undertaken to identify clones expressing scFv's. Alternatively said fragments are “domain antibody fragments”. Domain antibodies are the smallest binding part of an antibody (approximately 13 kDa). Examples of this technology is disclosed in U.S. Pat. No. 6,248,516, U.S. Pat. No. 6,291,158, U.S. Pat. No. 6,127,197 and EP0368684 which are all incorporated by reference in their entirety.

[0237] In a preferred method of the invention said antibody fragment is a single chain antibody variable region fragment.

[0238] A fragment of an antibody or immunoglobulin can also have bispecific function binding two different epitopes of two different antigens.

[0239] Preferably said chimeric/humanised monoclonal antibody to said polypeptide is produced as a fusion polypeptide in an expression vector suitably adapted for transfection or transformation of prokaryotic or eukaryotic cells.

[0240] In a further preferred embodiment of the invention said antibodies are opsonic antibodies.

[0241] Phagocytosis is mediated by macrophages and polymorphic leukocytes and involves the ingestion and digestion of micro-organisms, damaged or dead cells, cell debris, insoluble particles and activated clotting factors. Opsonins are agents which facilitate the phagocytosis of the above foreign bodies. Opsonic antibodies are therefore antibodies which provide the same function. Examples of opsonins are the Fc portion of an antibody or compliment C3.

[0242] Preferably, said antibody is provided with a marker including a conventional label or tag, for example a radioactive and/or fluorescent and/or epitope label or tag.

[0243] In an alternative preferred embodiment of the invention said antibody, or antibody fragment had associated therewith or crosslinked thereto a therapeutic agent. Preferably said therapeutic agent is a chemotherapeutic agent.

[0244] Preferably said agent is selected from the group consisting of: cisplatin; carboplatin; cyclosphosphamide; meiphalan; cannusline; methotrexate; 5-fluorouracil; cytarabine; mercaptopurine; daunorubicin; doxorubicin; epirubicin; vinblastine; vincristine; dactinomycin; mitomycin C; taxol; L-asparaginase; G-CSF; etoposide; colchicine; derferoxamine mesylate; and camptothecin.

[0245] In an alternative preferred embodiment of the invention said agent is a nucleic acid molecule. For example, an antisense nucleic acid; an aptamer; or a small interfering RNA.

[0246] In a preferred embodiment of the invention said nucleic acid molecule is a small interfering RNA.

[0247] A technique to specifically ablate gene function is through the introduction of double stranded RNA, also referred to as small inhibitory or interfering RNA (siRNA), into a cell which results in the destruction of mRNA complementary to the sequence included in the siRNA molecule. The siRNA molecule comprises two complementary strands of RNA (a sense strand and an antisense strand) annealed to each other to form a double stranded RNA molecule. The siRNA molecule is typically derived from exons of the gene which is to be ablated.

[0248] The mechanism of RNA interference is being elucidated. Many organisms respond to the presence of double stranded RNA by activating a cascade that leads to the formation of siRNA. The presence of double stranded RNA activates a protein complex comprising RNase III which processes the double stranded RNA into smaller fragments (siRNAs, approximately 21-29 nucleotides in length) which become part of a ribonucleoprotein complex. The siRNA acts as a guide for the RNase complex to cleave mRNA complementary to the antisense strand of the siRNA thereby resulting in destruction of the mRNA.

[0249] According to a further aspect of the invention there is provided a pharmaceutical composition comprising an agent according to the invention.

[0250] According to a further aspect of the invention there is provided a composition comprising a nucleic acid molecule selected from the group consisting of:
[0251] i) a nucleic acid molecule consisting of a nucleic acid sequence as represented in SEQ ID NO: 1-452;
[0252] ii) a nucleic acid molecule consisting of a nucleic acid sequence as represented in Table 1 by Genbank accession number;
[0253] iii) a nucleic acid molecule that hybridises under stringent hybridisation conditions to the nucleic acid molecule in (i) or (ii) above and which encodes a polypeptide wherein said polypeptide is stem cell specific.

[0254] According to a further aspect of the invention there is provided a composition comprising a polypeptide comprising an amino acid sequence selected from the group consisting of:
[0255] i) a polypeptide comprising an amino acid sequence as represented in Table 1 by Genbank accession number, or a variant polypeptide wherein said variant is modified by addition, deletion or substitution of at least one amino acid residue of the amino acid sequence presented in Table 1 by Genbank accession number;
[0256] ii) a polypeptide comprising an amino acid sequence encoded by a nucleic acid molecule comprising a nucleic acid sequence as represented in SEQ ID NO 1-452;
[0257] iii) a polypeptide comprising an amino acid sequence encoded by a nucleic acid molecule that hybridises under stringent hybridisation conditions to the nucleic acid molecule in (ii) above and which encodes a polypeptide wherein said polypeptide is stem cell specific wherein said composition is for use as a vaccine.

[0258] In a preferred embodiment of the invention said composition includes an adjuvant and/or a carrier.

[0259] An adjuvant is a substance or procedure that augments specific immune responses to antigens by modulating the activity of immune cells. Examples of adjuvants include, by example only, Freunds adjuvant, muramyl dipeptides, liposomes. A carrier is an immunogenic molecule which, when bound to a second molecule, augments immune responses to the latter. Some antigens are not intrinsically immunogenic yet may be capable of generating antibody responses when associated with a foreign protein molecule such as keyhole-limpet haemocyanin or tetanus toxoid. Such antigens contain B-cell epitopes but no T cell epitopes. The protein moiety of such a conjugate (the “carrier” protein) provides T-cell epitopes which stimulate helper T-cells that in turn stimulate antigen-specific B-cells to differentiate into plasma cells and produce antibody against the antigen. Helper T-cells can also stimulate other immune cells such as cytotoxic T-cells, and a carrier can fulfil an analogous role in generating cell-mediated immunity as well as antibodies.

[0260] When administered, the therapeutic compositions of the present invention are administered in pharmaceutically acceptable preparations. Such preparations may routinely contain pharmaceutically acceptable concentrations of salt, buffering agents, preservatives, compatible carriers, supplementary immune potentiating agents such as adjuvants and cytokines and optionally other therapeutic agents (for example, cisplatin; carboplatin; cyclosphosphamide; melphalan; carmusline; methotrexate; 5-fluorouracil; cytarabine; mercaptopurine; daunorubicin; doxorubicin; epirubicin; vinblastine; vincristine; dactinomycin; mitomycin C; taxol; L-asparaginase; G-CSF; etoposide; colchicine; derferoxamine mesylate; and camptothecin.

[0261] The therapeutics of the invention can be administered by any conventional route, including injection or by gradual infusion over time. The administration may, for example, be oral, intravenous, intraperitoneal, intramuscular, intracavity, subcutaneous, or transdermal. When antibodies are used therapeutically, a preferred route of administration is by pulmonary aerosol. Techniques for preparing aerosol delivery systems containing antibodies are well known to those of skill in the art. Generally, such systems should utilize components which will not significantly impair the biological properties of the antibodies, such as the paratope binding capacity (see, for example, Sciarra and Cutie, “Aerosols,” in Remington's Pharmaceutical Sciences, 18th edition, 1990, pp 1694-1712; incorporated by reference). Those of skill in the art can readily determine the various parameters and conditions for producing antibody aerosols without resort to undue experimentation.

[0262] The compositions of the invention are administered in effective amounts. An “effective amount” is that amount of a composition that alone, or together with further doses, produces the desired response. In the case of treating a particular disease, such as cancer, the desired response is inhibiting the progression of the disease. This may involve only slowing the progression of the disease temporarily, although more preferably, it involves halting the progression of the disease permanently. This can be monitored by routine methods or can be monitored according to diagnostic methods of the invention discussed herein.

[0263] Such amounts will depend, of course, on the particular condition being treated, the severity of the condition, the individual patient parameters including age, physical condition, size and weight, the duration of the treatment, the nature of concurrent therapy (if any), the specific route of administration and like factors within the knowledge and expertise of the health practitioner. These factors are well known to those of ordinary skill in the art and can be addressed with no more than routine experimentation. It is generally preferred that a maximum dose of the individual components or combinations thereof be used, that is, the highest safe dose according to sound medical judgment. It will be understood by those of ordinary skill in the art, however, that a patient may insist upon a lower dose or tolerable dose for medical reasons, psychological reasons or for virtually any other reasons.

[0264] The pharmaceutical compositions used in the foregoing methods preferably are sterile and contain an effective amount of antibody or nucleic acid for producing the desired response in a unit of weight or volume suitable for administration to a patient. The response can, for example, be measured by determining the signal transduction enhanced or inhibited by the composition via a reporter system, by measuring downstream effects such as gene expression, or by measuring the physiological effects of the composition. Likewise, the effects of antisense/siRNA molecules can be readily-determined by measuring expression of the individual genes in cells to which an antisense/siRNA composition is added. Other assays will be known to one of ordinary skill in the art and can be employed for measuring the level of the response.

[0265] The doses of antibody or nucleic acid administered to a subject can be chosen in accordance with different parameters, in particular in accordance with the mode of administration used and the state of the subject. Other factors include the desired period of treatment. In the event that a response in a subject is insufficient at the initial doses applied, higher doses (or effectively higher doses by a different, more localized delivery route) may be employed to the extent that patient tolerance permits.

[0266] In general, doses of antibody are formulated and administered in doses between 1 ng and 1 mg, and preferably between 10 ng and 100 μg, according to any standard procedure in the art. Where nucleic acids or variants thereof are employed, doses of between 1 ng and 0.1 mg generally will be formulated and administered according to standard procedures. Other protocols for the administration of the compositions will be known to one of ordinary skill in the art, in which the dose amount, schedule of injections, sites of injections, mode of administration (e.g., intra-bone) and the like vary from the foregoing. Administration of the compositions to mammals other than humans, (e.g. for testing purposes or veterinary therapeutic purposes), is carried out under substantially the same conditions as described above. A subject, as used herein, is a mammal, preferably a human, and including a non-human primate, cow, horse, pig, sheep, goat, dog, cat or rodent.

[0267] When administered, the pharmaceutical preparations of the invention are applied in pharmaceutically-acceptable amounts and in pharmaceutically-acceptable compositions. The term “pharmaceutically acceptable” means a non-toxic material that does not interfere with the effectiveness of the biological activity of the active ingredients. Such preparations may routinely contain salts, buffering agents, preservatives, compatible carriers, and optionally other therapeutic agents. When used in medicine, the salts should be pharmaceutically acceptable, but non-pharmaceutically acceptable salts may conveniently be used to prepare pharmaceutically-acceptable salts thereof and are not excluded from the scope of the invention. Such pharmacologically and pharmaceutically-acceptable salts include, but are not limited to, those prepared from the following acids: hydrochloric, hydrobromic, sulfuric, nitric, phosphoric, maleic, acetic, salicylic, citric, formic, malonic, succinic, and the like. Also, pharmaceutically-acceptable salts can be prepared as alkaline metal or alkaline earth salts, such as sodium, potassium or calcium salts.

[0268] Pharmaceutical compositions may be combined, if desired, with a pharmaceutically-acceptable carrier. The term “pharmaceutically-acceptable carrier” as used herein means one or more compatible solid or liquid fillers, diluents or encapsulating substances which are suitable for administration into a human. The term “carrier” denotes an organic or inorganic ingredient, natural or synthetic, with which the active ingredient is combined to facilitate the application. The components of the pharmaceutical compositions also are capable of being co-mingled with the molecules of the present invention, and with each other, in a manner such that there is no interaction which would substantially impair the desired pharmaceutical efficacy.

[0269] The pharmaceutical compositions may contain suitable buffering agents, including: acetic acid in a salt; citric acid in a salt; boric acid in a salt; and phosphoric acid in a salt.

[0270] The pharmaceutical compositions also may contain, optionally, suitable preservatives, such as: benzalkonium chloride; chlorobutanol; parabens and thimerosal.

[0271] The pharmaceutical compositions may conveniently be presented in unit dosage form and may be prepared by any of the methods well-known in the art of pharmacy. All methods include the step of bringing the active agent into association with a carrier which constitutes one or more accessory ingredients. In general, the compositions are prepared by uniformly and intimately bringing the active compound into association with a liquid carrier, a finely divided solid carrier, or both, and then, if necessary, shaping the product.

[0272] Compositions suitable for oral administration may be presented as discrete units, such as capsules, tablets, lozenges, each containing a predetermined amount of the active compound. Other compositions include suspensions in aqueous liquids or non-aqueous liquids such as syrup, elixir or an emulsion.

[0273] Compositions suitable for parenteral administration conveniently comprise a sterile aqueous or non-aqueous preparation of antibody or nucleic acids, which is preferably isotonic with the blood of the recipient. This preparation may be formulated according to known methods using suitable dispersing or wetting agents and suspending agents. The sterile injectable preparation also may be a sterile injectable solution or suspension in a non-toxic parenterally-acceptable diluent or solvent, for example, as a solution in 1,3-butane diol. Among the acceptable vehicles and solvents that may be employed are water, Ringer's solution, and isotonic sodium chloride solution. In addition, sterile, fixed oils are conventionally employed as a solvent or suspending medium. For this purpose any bland fixed oil may be employed including synthetic mono- or di-glycerides. In addition, fatty acids such as oleic acid may be used in the preparation of injectables. Carrier formulation suitable for oral, subcutaneous, intravenous, intramuscular, etc. administrations can be found in Remington's Pharmaceutical Sciences, Mack Publishing Co., Easton, Pa.

[0274] According to a further aspect of the invention there is provided a vector which is adapted for the expression of the humanised or chimeric antibodies according to the invention.

[0275] According to an aspect of the invention there is provided a cell which has been transformed or transfected with the vector encoding the humanised or chimeric antibody according to the invention

[0276] According to a further aspect of the invention there is provided a method for the production of the humanised or chimeric antibody according to the invention comprising:
[0277] (i) providing a cell transformed or transfected with a vector which comprises a nucleic acid molecule encoding the humanised or chimeric antibody according to the invention;
[0278] (ii) growing said cell in conditions conducive to the manufacture of said antibody; and
[0279] (iii) purifying said antibody from said cell, or its growth environment.

[0280] In a yet further aspect of the invention there is provided a hybridoma cell line which produces a monoclonal antibody as hereinbefore described.

[0281] In a further aspect of the invention there is provided a method of producing monoclonal antibodies according to the invention using hybridoma cell lines according to the invention.

[0282] In a further aspect of the invention there is provided a method for preparing a hybridoma cell-line producing monoclonal antibodies according to the invention comprising the steps of:
[0283] i) immunizing an immunocompetent mammal with an immunogen comprising at least one polypeptide having the amino acid sequence as represented in Table 1 by Genbank accession number, or fragments thereof or at least one polypeptide encoded by a nucleic acid molecule as represented in SEQ ID NO 1-452;
[0284] ii) fusing lymphocytes of the immunised immunocompetent mammal with myeloma cells to form hybridoma cells;
[0285] iii) screening monoclonal antibodies produced by the hybridoma cells of step (ii) for binding activity to the polypeptide of (i);
[0286] iv) culturing the hybridoma cells to proliferate and/or to secrete said monoclonal antibody; and
[0287] v) recovering the monoclonal antibody from the culture supernatant.

[0288] Preferably, the said immunocompetent mammal is a mouse. Alternatively, said immunocompetent mammal is a rat.

[0289] The production of monoclonal antibodies using hybridoma cells is well-known in the art. The methods used to produce monoclonal antibodies are disclosed by Kohler and Milstein in Nature 256, 495-497 (1975) and also by Donillard and Hoffman, “Basic Facts about Hybridomas” in Compendium of Immunology V.II ed. by Schwartz, 1981, which are incorporated by reference.

[0290] According to a further aspect of the invention there is provided a diagnostic assay for the determination of cancer in a subject comprising the steps of:
[0291] i) providing an isolated cell sample;
[0292] ii) contacting the sample in (i) with a binding agent(s) that bind to a nucleic acid molecule as represented by the nucleic acid sequence in SEQ ID NO 1-452;
[0293] iii) determining the expression of said nucleic acid molecule in said sample when compared to a normal matched control sample.

[0294] In a preferred embodiment of the invention said binding agent(s) is an oligonucleotide primer. Preferably said assay is a polymerase chain reaction.

[0295] In an alternative preferred embodiment of the invention said binding agent is an antibody that specifically binds a polypeptide encoded by a nucleic acid molecule as represented in SEQ ID NO 1-452, or a polypeptide variant comprising an amino acid sequence that varies from a reference amino acid sequence by addition, deletion or substitution of at least one amino acid residue.

[0296] In a preferred embodiment of the invention said cancer is prostate cancer.

[0297] According to a further aspect of the invention there is provided a kit comprising a binding agent specifically reactive with a nucleic acid molecule as represented by the nucleic acid sequence in SEQ ID NO 1-452, or an agent specifically reactive with a polypeptide comprising an amino acid sequence encoded by a nucleic acid molecule comprising a nucleic acid sequence as represented in SEQ ID NO 1-452.

[0298] In a preferred embodiment of the invention said kit further comprises an oligonucleotide or antibody specifically reactive with said nucleic acid molecule or said polypeptide.

[0299] Preferably said kit comprises a thermostable DNA polymerase and components required for conducting the amplification of nucleic acid. Preferably said kit includes a set of instructions for conducting said polymerase chain reaction and control nucleic acid.

[0300] In an alternative preferred embodiment of the invention said kit comprises an antibody specifically reactive with a polypeptide comprising an amino acid sequence encoded by a nucleic acid sequence as represented in SEQ ID NO 1-452.

[0301] Preferably said kit comprises components required for conducting an immunoassay including, for example, a secondary antibody specifically reactive with a primary antibody that specifically binds said polypeptide(s) and enzyme reagents required to detect the binding of said secondary antibody with said primary antibody.

[0302] According to a further aspect of the invention there is provided a method to screen for an agent that modulates the activity of a polypeptide encoded by a nucleic acid molecule selected from the group consisting of:
[0303] a) a nucleic acid molecule comprising a nucleic acid sequence as represented in SEQ ID NO 1-452;
[0304] a) a nucleic acid molecule consisting of a nucleic acid sequence as represented in Table 1 by Genbank accession number;
[0305] b) a nucleic acid molecule that hybridises under stringent hybridisation conditions to the nucleic acid molecule in (i) or (ii) above and which encodes a polypeptide wherein said polypeptide is stem cell specific;
[0306] i) forming a preparation comprising a polypeptide, or sequence variant thereof, and at least one agent to be tested;
[0307] ii) determining the activity of said agent with respect to the activity of said polypeptide.

[0308] In a preferred method of the invention said agent is an antagonist. In an alternative preferred method of the invention said agent is an agonist.

[0309] Agents identified by the screening method of the invention include, antibodies, siRNA, aptamers, small organic molecules, (for example peptides, cyclic peptides), dominant negative variants of the polypeptides herein disclosed.

[0310] As mentioned above, the invention also provides, in certain embodiments, “dominant negative” polypeptides derived from the polypeptides herein disclosed. A dominant negative polypeptide is an inactive variant of a protein, which, by interacting with the cellular machinery, displaces an active protein from its interaction with the cellular machinery or competes with the active protein, thereby reducing the effect of the active protein. For example, a dominant negative receptor which binds a ligand but does not transmit a signal in response to binding of the ligand can reduce the biological effect of expression of the ligand. Likewise, a dominant negative catalytically-inactive kinase which interacts normally with target proteins but does not phosphorylate the target proteins can reduce phosphorylation of the target proteins in response to a cellular signal. Similarly, a dominant negative transcription factor which binds to another transcription factor or to a promoter site in the control region of a gene but does not increase gene transcription can reduce the effect of a normal transcription factor by occupying promoter binding sites without increasing transcription.

[0311] It will be apparent to one skilled in the art that modification to the amino acid sequence of peptides agents could enhance the binding and/or stability of the peptide with respect to its target sequence. In addition, modification of the peptide may also increase the in vivo stability of the peptide thereby reducing the effective amount of peptide necessary to inhibit the activity of the polypeptides herein disclosed. This would advantageously reduce undesirable side effects which may result in vivo. Modifications include, by example and not by way of limitation, acetylation and amidation. Alternatively or preferably, said modification includes the use of modified amino acids in the production of recombinant or synthetic forms of peptides. It will be apparent to one skilled in the art that modified amino acids include, for example, 4-hydroxyproline, 5-hydroxylysine, N⁶-acetyllysine, N⁶-methyllysine, N⁶,N⁶-dimethyllysine, N⁶,N⁶,N⁶-trimethyllysine, cyclohexyalanine, D-amino acids, ornithine. Other modifications include amino acids with a C₂, C₃ or C₄ alkyl R group optionally substituted by 1, 2 or 3 substituents selected from halo (e.g. F, Br, I), hydroxy or C₁-C₄ alkoxy. It will also be apparent to one skilled in the art that peptides which retain p53 binding activity could be modified by cyclisation. Cyclisation is known in the art, (see Scott et al Chem Biol (2001), 8:801-815; Gellerman et al J. Peptide Res (2001), 57: 277-291; Dutta et al J. Peptide Res (2000), 8: 398-412; Ngoka and Gross J Amer Soc Mass Spec (1999), 10:360-363.

[0312] According to a further aspect of the invention there is provided a method to treat a subject for a cancer comprising administering an effective amount of an agent according to the invention.

[0313] In a preferred method of the invention said subject is human.

[0314] In a preferred method of the invention said cancer is prostate cancer.

[0315] According to a further aspect of the invention there is provided a method to immunise an animal against a cancerous condition comprising administering an effective amount of a nucleic acid or polypeptide encoded by a nucleic acid molecule selected from the group consisting of according to the invention.

[0316] In a preferred method of the invention said animal is a human.

[0317] In a further preferred embodiment of the invention said cancer is prostate cancer.

[0318] As used herein, the term “cancer” refers to cells having the capacity for autonomous growth, i.e., an abnormal state or condition characterized by rapidly proliferating cell growth. The term is meant to include all types of cancerous growths or oncogenic processes, metastatic tissues or malignantly transformed cells, tissues, or organs, irrespective of histopathologic type or stage of invasiveness. The term “cancer” includes malignancies of the various organ systems, such as those affecting, for example, lung, breast, thyroid, lymphoid, gastrointestinal, and genito-urinary tract, as well as adenocarcinomas which include malignancies such as most colon cancers, renal-cell carcinoma, prostate cancer and/or testicular tumours, non-small cell carcinoma of the lung, cancer of the small intestine and cancer of the esophagus. The term “carcinoma” is art recognized and refers to malignancies of epithelial or endocrine tissues including respiratory system carcinomas, gastrointestinal system carcinomas, genitourinary system carcinomas, testicular carcinomas, breast carcinomas, prostatic carcinomas, endocrine system carcinomas, and melanomas. Exemplary carcinomas include those forming from tissue of the cervix, lung, prostate, breast, head and neck, colon and ovary. The term “carcinoma” also includes carcinosarcomas, e.g., which include malignant tumours composed of carcinomatous and sarcomatous tissues. An “adenocarcinoma” refers to a carcinoma derived from glandular tissue or in which the tumor cells form recognizable glandular structures. The term “sarcoma” is art recognized and refers to malignant tumors of mesenchymal derivation.

[0319] Throughout the description and claims of this specification, the words “comprise” and “contain” and variations of the words, for example “comprising” and “comprises”, means “including but not limited to”, and is not intended to (and does not) exclude other moieties, additives, components, integers or steps.

[0320] Throughout the description and claims of this specification, the singular encompasses the plural unless the context otherwise requires. In particular, where the indefinite article is used, the specification is to be understood as contemplating plurality as well as singularity, unless the context requires otherwise.

[0321] Features, integers, characteristics, compounds, chemical moieties or groups described in conjunction with a particular aspect, embodiment or example of the invention are to be understood to be applicable to any other aspect, embodiment or example described herein unless incompatible therewith.

[0322] An embodiment of the invention will now be described by example only and with reference to the following Figures and Materials and Methods;

[0323] FIG. 1: Verification of CD133 as a stem cell marker of prostatic epithelia: 1A: A paraffin section of prostatic acini labelled with the nuclear stain DAPI (Blue) and anti-CD133 directly conjugated to PE (Red). 1B: Basal cells with the phenotype α₂β₁^{hi}/CD133⁺ have a higher colony forming efficiency (CFE) than α₂⊕₂^{low}/CD133⁻. (CFE) was calculated as the number of colonies formed per number of selected cells ×100%. CFEs are expressed as the ratio of the control CFE. Results show means ±s.e.m of four experiments. 1C. Xenografts of prostate acini formed by transplantation of α₂β₁^{hi}/CD133⁺ basal cells stained with (A) Haematoxylin and Eosin, (B) 34βE12, (C) anti-K18, (D) anti-PAP (E) Anti-androgen receptor. Bar 40 μm;

[0324] FIG. 2: Characterisation of tumour ‘stem’ cells from a lymph node metastasis of the prostate (LNMP). 2A. Tumour cells selected on the basis of □₂□₁/CD133 differentiate in culture. 2B. Invasion assay activity of LNMP in comparison to PC3M and an immortalised prostate epithelial cell line, PNT1a;

[0325] FIG. 3a represents NFkB Expression from α₂^{hi}/CD133+ cells (PE434 cells; Gleason 9); FIG. 3b represents a FACS dot plot of NFkB and CD133+ expression; 84% of cells are positive for NFkB alone and 0.21% are positive for NFkB and CD133.

[0326] Table 1 summarises array analysis of prostate stem cells and prostates cancer stem cells. Genes/nucleic acid and amino acid sequences are identified by Genbank accession number which can be accessed at http://www.ncbi.nlm.nih.gov. Genes are also identified by common name. The content of each accession entry is incorporated by reference and including the amino acid sequences of individual genes.

### Materials and Methods

### Genotype of Isolated Tumour Stem Cells

[0327] Using a combination of microsatellite markers associated with sporadic prostate cancer (8p 10q 16p) we can determine whether the isolated HEA⁺/CD44⁺/α₂β₁^{hi}/CD133⁺ cells display loss of heterozygosity patterns characteristic of prostate tumours in comparison to blood lymphocyte DNA from the same patient. The analysis is carried out on a microsampling of cultures with 3 MM paper and fluorescently labelled PCR primers (MacIntosh et al., 1998). This will enable us to discriminate between normal and cancer cells and determine whether stem cells are indeed targets for transforming events.

### Proliferative, Differentiative and Malignant Potential of Putative Cancer Stem Cells

[0328] Distinct populations of tumour cells are isolated and their proliferative, differentiative and malignant potential determined in vitro and in vivo. The following populations (HEA⁺/CD44⁻ (luminal cells), HEA+/CD44⁺ (basal cells), HEA⁺/CD44⁺/α₂β₁^{low}/CD133⁻ (transit cells), HEA⁺/CD44⁺/α₂β₁^{hi}/CD133⁺ (stem cells) are isolated and compared with the unsorted tumour population.

Colony Forming efficiency (CFE): Anchorage Independent and Anchorage-Dependent Growth

[0329] The transforming potential of distinct populations (as above) of cancer cells (anchorage independence) is measured by their ability to form colonies in soft agar. Individual colonies are counted after 21 days using an inverted microscope. Comparisons are made of CFE and colony size.

### Morphogenesis in Gels of Reconstituted Basement Membrane Matrix

[0330] We have determined the potential of tumour stem cells and their progenitors to undergo glandular morphogenesis in reconstituted basement membrane (e.g. Matrigel). We have demonstrated that normal basal cells can undergo glandular morphogenesis when grown in a collagen based matrix, (e.g. Matrigel) with stroma, in the presence of androgens. Spheroids are generated which are architecturally and phenotypically similar to in vivo acini and are often branched alveolar- and duct like (Lang et al., 2001). In contrast, cancer cells often form large aggregates of spindle-shaped cells with no obvious organisation. Nonetheless, the structures will often contain cells that show some degree of differentiation and can be compared to the original tumour.

### Invasion Assays

[0331] The ability of these stem cells to migrate across Matrigel is determined by the modified Boyden-chamber method (Albini et al., 1987). Migration rates will be evaluated using time-lapse confocal microscopy, using cells labelled with EGFP. We have generated prostate epithelium expressing low levels of EGFP. Recombinant retrovirus based on pLNCX-EGFP(2) generated will be used to infect the cell populations and G418 resistant colonies will be used in motility assays. The low levels of GFP expression will be used to track invasion and motility in real time.

### In Vivo Tumourigenesis

[0332] Tumour stem cells must possess key criteria that define normal stem cells: after transplantation they must proliferate, differentiate and self-renew. To determine the ability of distinct tumour phenotypes, to colonise in vivo, grafts of stem cells, transit cells, basal cells, luminal cells and unsorted cells are introduced into the prostates of 6 to 8 week old male, immuno-compromised mice. The mice are treated hormonally at the time of grafting by subcutaneous implantation of sustained release testosterone pellets. The number of cells from each population that successfully engraft and initiate tumour proliferation is determined by varying the number of cells implanted. The self-renewal capacity of the distinct populations is determined by transplanting serially into secondary recipients.

### Array Sample and Data Processing

### Total RNA Extraction

[0333] α₂^{high}/CD133⁺ Cells

[0334] Total RNA is extracted from up to 1×10⁴ selected cells using QIAgen RNeasy micro columns. Cells are lysed in 100 μl RLT buffer+1% β-mercaptoethanol and the manufactures protocol for “total RNA isolation from animal cells” is followed (RNeasy_Micro0403.pdf, pages 39-44, which is incorporated by reference).

### α₂^{low} Low Cells

[0335] Total RNA is extracted from between 1×10⁵ and 1×10⁶ selected cells using QIAgen RNeasy mini columns. Cells are lysed in 350 μl RLT buffer+1% β-mercaptoethanol and the manufactures protocol for “isolation of total RNA from animal cells” cells is followed (RNeasy_Mini0601.pdf, pages 31-35, which is incorporated by reference).

[0336] RNA yields are determined spectrophotometrically at 260 nm and RNA integrity checked by capillary electrophoresis using an Agilent 2100 bioanalyzer.

Production of Fragmented Labelled cRNA

[0337] Total RNA is amplified using two rounds of cDNA synthesis and IVT (in vitro transcription) and biotin labelled by following the Affymetrix small scale labelling protocol vII (smallv2_technote.pdf which is incorporated by reference) with the following modifications:
[0338] 1. 10-50 ng of total RNA is used per sample (step 1).
[0339] 2. T4 DNA polymerase steps in the two second strand cDNA synthesis reactions are omitted (steps 2 & 7).
[0340] 3. Second cycle, IVT for cRNA amplification and labelling (step 9) uses the Affymetrix GeneChip IVT labelling ldt instead of the ENZO BioArray HighYield RNA transcript labelling kit and the Affymetrix eukaryotic sample and array processing standard protocol (expression_s2_manual_{—}0604.pdf, section 2.1.34-2.1.35 which is incorporated by reference) is followed for this stage.

[0341] The quality of first and second round cRNA products and fragmented cRNA are checked by capillary electrophoresis using an Agilent 2100 bioanalyzer.

### Array Hybridisation

[0342] Labelled fragmented cRNA (15 μg) is hybridised to oligonucleotide probes on an Affymetrix HG-U133plus2 GeneChip. For hybridisation, washing, staining and scanning the Affymetrix eukaryotic sample and array processing standard protocol (expression_s2_manual_{—}0604.pdf, section 2.2.3-2.3.17 which is incorporated by reference) is followed.
[0343] 1. Hybridisation is conducted using an Affymetrix Hybridisation Oven 640.
[0344] 2. Washing and staining stages are conducted using an Affymetrix Fluidics Station 450 using the EukGE-WS2v5 protocol.
[0345] 3. Scanning of arrays is done with an Affymetrix Gene Scanner 3000.

### Data Processing

[0346] Scanned GeneChip images are processed using Affymetrix GCOS software to derive an intensity value and flag (present, absent or marginal) for each probe. Probe intensities are derived using the MASS algorithm.

[0347] Comparisons between different sample datasets are conducted using Agilent GeneSpring GX software. Datasets to be compared are first normalised using three steps (consecutively applied in the order given):
[0348] 1. Transform values <0.01 to 0.01
[0349] 2. Normalise each chip to the 50 percentile of the measurements taken for that chip.
[0350] 3. Normalise each probe to the median of the measurements for that probe.

[0351] For the purpose of analysing the data the following parameters are applied:
[0352] 1. All cells derived from prostate cancer specimens are classed malignant, all cells derived from BPH specimens are classed benign (“tumour type” parameter)
[0353] 2. All cells obtained by selection for high integrin α₂β₁ expression and CD133 are classed stem cells, all cells selected for low integrin α₂β₁ expression are classed committed basal cells (“cell type” parameter).
[0354] 3. Further interpretations of the data allow for the combining of the above parameters to derive the conditions: malignant stem cells, malignant committed basal cells, benign stem cells and benign committed basal cells.

[0355] Low quality and uninformative data is removed using three selections (consecutively applied in the order given):
[0356] 1. Remove probes flagged “absent” in all samples.
[0357] 2. Remove probes with standard deviation within a parameter class of >1 in at least 3 of the 4 conditions.
[0358] 3. Remove probes with less than a 2-fold overall change in normalised expression value between all four of the conditions.

The application's sequence listing, which the Patent Office published only in electronic form, follows.

SEQUENCE LISTING (452 sequences)

SEQ ID NO: 1 - DNA, 11025 bp, Homo sapiens
gagcatcttttggggggagggaattcagcggatcagtcttaagaggagcttttttttggagcgagaaatcatataaaataaaatgaaataaaacaaggaggaaggcaaccagctgttaggggaaaaataaggcagataaaggagcggggagagaaattaattgccaaccaggaggagttgggctgtatttttcaaaggtggggagagtggagcacacaccttgaggaggaaagcgagaaagaaaagaaaaaagcaagtggaaaggggggctcgcccaagaagggtgaagaagcgaagaaagtcgaggcgccgaggctcccaaagctggcagctccgggtggcggtgcaggggcgaagggggggcggggggaaccgtcggacatgcggctctggagttgggtgctgcacctggggctgctgagcgccgcgctgggctgcgggctggccgagcgtccccgccgggcccggagagacccgcgggccggccgacccccgcgccccgccgccggcccggccacctgcgccacccgggcggcccgcggccgccgcgcctcgccgccgccgccgccgccgccgggcggtgcctgggaagccgtgcgcgtcccccggcggcggcagcagcgggaggcgaggggcgccaccgaggagccgagcccgccgagccgggcgctctatttcagcgggcgaggcgagcagctgcgcctccgggccgacctcgagctgccccgggacgcgttcacgctgcaagtgtggctgcgagcggaggggggccagaggtctccggcagtgatcacagggctgtatgacaaatgttcttatatctcacgtgaccgaggatgggtcgtgggcattcacaccatcagtgaccaagacaacaaagacccacgctactttttctccttgaagacagaccgagcccggcaagtgaccaccatcaatgcccaccgcagctacctcccaggccagtgggtatacctagctgccacctatgatgggcagttcatgaagctctatgtgaatggtgcccaggtggccacctctggggaacaagtgggtggcatattcagcccactgacccagaagtgcaaagtgctcatgttagggggcagtgccctgaatcacaactaccggggctacatcgagcacttcagtctgtggaaggtggccaggactcagcgggagatactgtctgacatggaaacccatggcgcccacactgctctacctcagctcctcctccaggagaactgggacaatgtgaagcatgcctggtcccccatgaaggatggcagcagccccaaagtggaattcagcaatgcccacggctttctgctggacacgagtctggagcctcctctgtgcggacagacattgtgtgacaacacagaggtcattgccagctacaatcagctctcaagtttccgccagcccaaggtggtgcgctaccgcgtggtcaacctctatgaagatgatcataagaacccgacggtgacgcgcgagcaggtggacttccagcaccatcagctggctgaggccttcaagcaatacaacatctcctgggagctggacgtgctggaggtgagcaactcctcccttcgccgccgcctcatcctggccaactgtgacatcagcaagattggggatgagaactgtgaccccgagtgcaaccacacgctgacgggccacgacggcggggattgccgccacctgcgccaccctgccttcgtgaagaagcagcacaacggggtgtgtgacatggactgcaactatgaacggttcaactttgatggtggagagtgctgtgaccctgaaatcaccaatgtcactcagacttgctttgaccccgactctccacacagagcctacttggatgttaatgagctgaagaacattcttaaattggatggatcaacacatctcaatattttctttgcaaaatcctcagaggaggagttggcaggagtagcaacttggccatgggacaaggaggccctgatgcacttaggtggcattgtcttgaacccatctttctatggcatgcctgggcacacccacaccatgatccatgagattggtcacagcctgggcctctatcacgtcttccgaggcatctcagaaatccagtcctgcagtgacccctgcatggagacagagccctccttcgagactggagacctctgcaatgataccaacccagcccctaaacacaagtcctgtggtgacccagggccaggaaatgacacctgtggctttcatagcttcttcaacactccttacaacaacttcatgagctatgcagatgacgactgtacggactccttcacgcccaatcaagtcgccagaatgcactgttacctggacctggtctaccagggctggcagccctccaggaaaccagcgcctgttgccctcgccccccaagttctgggccacacaacggactctgtgacactggagtggttcccacctatagatggccatttctttgaaagagaattgggatcagcatgtcatctttgcctggaagggagaatcctggtgcagtatgcttccaacgcttcctccccaatgccctgcagcccatcaggacactggagccctcgtgaagcagaaggtcatcctgatgttgaacagccctgtaagtccagtgtccgcacctggagcccaaattcagctgtcaacccacacacggttcctccagcctgccctgagcctcaaggctgctacctcgagctggagttcctctaccccttggtccctgagtctctgaccatttgggtgacctttgtctccactgactgggactctagtggagctgtcaatgacatcaaactgttggctgtcagtgggaagaacatctccctgggtcctcagaatgtcttctgtgatgtcccactgaccatcagactctgggacgtgggcgaggaggtgtatggcatccaaatctacacgctggatgagcacctggagatcgatgctgccatgttgacctccactgcagacaccccactctgtctacagtgtaagcccctgaagtataaggtggtccgggaccctcctctccagatggatgtggcctccatcctacatctcaataggaaattcgtagacatggatctaaatcttggcagtgtgtaccagtattgggtcataactatttcaggaactgaagagagtgagccatcacctgctgtcacatacatccatggaagtgggtactgtggcgatggcattatacaaaaagaccaaggtgaacaatgcgacgacatgaataagatcaatggtgatggctgctcccttttctgccgacaagaagtctccttcaattgtattgatgaacccagccggtgctatttccatgatggtgatggggtatgtgaggagtttgaacaaaaaaccagcattaaggactgtggtgtctacacgccccagggattcctggatcagtgggcatccaatgcttcagtatctcatcaagaccagcaatgcccaggctgggtcatcatcggacagccagcagcatcccaggtgtgtcgaaccaaggtgatagatctcagtgaaggcatttcccagcatgcctggtacccttgcaccatcagctacccatattcccagctggctcagaccactttttggctccgggcgtatttttctcaaccaatggttgccgcagctgtcattgtccacctggtgacggatgggacatattatggggaccaaaagcaggagaccatcagcgtgcagctgcttgataccaaagatcagagccacgatctaggcctccatgtcctgagctgcaggaacaatcccctgattatccctgtggtccatgacctcagccagcccttctaccacagccaggcggtacgtgtgagcttcagttcgcccctggtcgccatctcgggggtggccctccgttccttcgacaactttgaccccgtcaccctgagcagctgccagagaggggagacctacagccctgccgagcagagctgcgtgcacttcgcatgtgagaaaactgactgtccagagctggctgtggagaatgcttctctcaattgctccagcagcgaccgctaccacggtgcccagtgtactgtgagctgccggacaggctacgtgctccagatacggcgggatgatgagctgatcaagagccagacgggacccagcgtcacagtgacctgtacagagggcaagtggaataagcaggtggcctgtgagccagtcgactgcagcatcccagatcaccatcaagtctatgctgcctccttctcctgccctgagggcaccacctttggcagtcaatgttccttccagtgccgtcaccctgcacaattgaaaggcaacaacagcctcctgacctgcatggaggatgggctgtggtccttcccagaggccctgtgtgagctcatgtgcctcgctccaccccctgtgcccaatgcagacctccagaccgcccggtgccgagagaataagcacaaggtgggctccttctgcaaatacaaatgcaagcctggataccatgtgcctggatcctctcggaagtcaaagaaacgggccttcaagactcagtgtacccaggatggcagctggcaggagggagcttgtgttcctgtgacctgtgacccacctccaccaaaattccatgggctctaccagtgtactaatggcttccagttcaacagtgagtgtaggatcaagtgtgaagacagtgatgcctcccagggacttgggagcaatgtcattcattgccggaaagatggcacctggaacggctccttccatgtctgccaggagatgcaaggccagtgctcggttccaaacgagctcaacagcaacctcaaactgcagtgccctgatggctatgccatagggtcggagtgtgccacctcgtgcctggaccacaacagcgagtccatcatcctgccaatgaacgtgaccgtgcgtgacatcccccactggctgaaccccacacgggtagagagagttgtctgcactgctggtctcaagtggtatcctcaccctgctctgattcactgtgtcaaaggctgtgagcccttcatgggagacaattattgtgatgccatcaacaaccgagccttttgcaactatgacggtggggattgctgcacctccacagtgaagaccaaaaaggtcaccccattccctatgtcctgtgatctacaaggtgactgtgcttgtcgggacccccaggcccaagaacacagccggaaagacctccggggatacagccatggctaaggaaggacaagaagttgtcaaagaattcccaacgccaggacccacatccctttggtattgatttcacagtcagctgctcaacggaatggcctctccacaccagggatccttagcacccaaccggtctgcctttaattttacccaggaaggactcacattggggcgaatgaaccaagtttcgccatgctggatgatgaaatggattcccatcccaaagtctgagatggattgcatatacagtgtgcagtcccagagcctcctaaaattctagccatttgtcacacaaccacagcaagaaacgtgttctatatctagagtgtgcccatctgtgtttagtacacatgcatgcatacacacccatacaaacatctgtgtgagggcagttctggagatgagcagagagagaccggaataaactcaatcttttctttcccaagctcctagccaacactatccttgggagaaagaaatttgcagaaactgctaagaccaagtgtggagatgtcaagctagttcacactctgaggctcagaatatgtaggacatgcacaattgtgcagtcctttgggattggaagtgaaacagtctgtgatcccctaccttctagggaactaggacctaggaagaggtaaagattatcaggtatgcaaagcgccccaattcttctgctgccatgggggattttaccccaactccagggttcgaggccaatctgagaatggcttaggattgcaatgtcaaggtattatatcagccccttgcttgaggcttgaggtcataatatccctctaggacttacctgttcccccagatcttgccttgggaccacatttgctgctacttttcctgctgctctatcctatacattgaataatccaagatggtagaactaggttaggaaaaattccacacaaccaaacagtctgccttaaaagtgacccacatttttccatagctcctcactttttagcccttctgcaagagaaaaaccctcatgggtccacatggtgagaagttaagtttcctgtaagtgggcctctcaccctggaaaggagttgagggacatcagatgctggaaccctcactgaaagtccagaatgtctaagccagtgttagattttgtaaacaagtggaacagtgttaaatttctatgatgttggagccatccagagactactggaattgtcgagacttttggattattatccttatccttatcctaatcttcctagcccttcaggctagagtaggcttcgatcctgagaaccttgctgttgctctgaggagatataattctgggagaaagaatcttttataagaacagtacagattgttctcaagagggccatcagaaggaagccaaagagttcacagcctcagcaccaacaactcaacatggtcatcatgttttctatatggtttttccagctagcagtactcccttccatacctgtgactgggcagtgcttttctctctcccatgtctagcctccaaaagttaagtgaaaattagtcaactgcacgtggaagcccccaccactttggggatctctttatttcttttcagccagggacctgtccactccctttgaattaatatgggaagaaattaatacaggatgaactggagagaagggttgagtgtggcatactttctgaaacctggagctgggaattgcggagaagggaaggtctagactagttacatcacatagggattactgtaaatcaagtcatctcaagtctagtgaagacagccaacagaaacaaaacctagcatagggatagaaaataccatgcacgtgtgcagccccacctaattcctgcatccaaggcaggtgttgttaatctatcatagcacttaaaaaaaaaaaaaaaaagagaccaaaaataactttaggaaccaccatattatatcactcccaatagcactgacctggtgatcaaaaacacttgagaagacatctattggccatctctggccaattacactaagaaacatatcaaggtgcttttggcacaggtgcccacaaatacggatgcagtgctgagatagtttatgagacttgtaccatttcacaaactctgaaattgggttccatattggcaaggctgccacagttgttaagaataatcctctatgtttcttcctcacaaaaccatatctcatttatatccagaccattacttcactataattacaaggacaaattattagcaagaaataagaatagtattagaagaattgatcctattttgaacccctctccagtatcttcacactcttgtcaactctccaggcctctctcttgccctgagttatcagcctgtgtggtgttaactaccttagaaggtacaagctaagaaatgtaacagtatcaaccctcccagttgcttaattatacccataggtaatacaaaaagctctgaagacccaaagatgacattactaatgatgtgatttcaggagccacagaagaaccttaccagcttccctcaaatcagtccttatcctctttctatcttcactcccatcatcatctattttcacactatccagctaagcaaagattcctggaggctgacttgtatcttcagactcacagagtgaattcagctcttctgaatcaagacccacccagtctctttcattcagacctgttgctaacaaatttatatttgccaaggatattaggcaaaagaggctacttgattggtggccaacctcgtgcccacatggaaggtatctttaatagggtcttttcaaaccttagtggaggagggtcagctcaatttgggcaatgcatttgttcccagtttcattttcttcctgggaattaactcgtcatttcattccttcagtcatcttctgtgtaggtgaccggagcactgagaggcagctctgatgcactattgtgtgtcagcagctcaaaggccctaaaacactgaaggttctgcatctgaagtattagattgttagcagcaaaatatgaaagatgaggtggacagtcctctaagccctatttagggaagcttttccaagccacaatcttaactacctacccaaaggatttgcattacccccagattctgtgccaacaaccttttaaggaaatacagtccttgggaaatgagttttgatggtgaattggggtgttaaggaagggaaagattgtcatagatggtagggctttgaaaatgcagggtatcagctgccactcctggcttcaacacattgagtcactgcctagacggttctcttggtcttattcccatcctggccaatgcttaaatactatttgttgaaaataattctttgagacagatttcagctacctcccttccaggttcgatttaacttggttgtaattgtcaatttgttgttataggtcttacctgtgtgaaagaaagaaaaagaaagaaagaaagaaagagaaaggaaattataaggtcaagttaacagttttgaggttttgtgtttttttctggaactacttcaagtgagaaaataaaaaaaaatggtgacaaagctgtacagatagagataatagaagacaaagagattaaaaggaaataaaaatgcatgattaaaaactaagaataaaaaacctatttttatgtttcctaaaggaaattgtttattctacagcctcagtaggtagacacaaacataaagatttccctagaagacatagagtgggatttgataacactgtctgttattttctgtacattgtggtaggtccaggaaatatgacattttcccccttgatgtgttattgttgttgttgggtggggtgggcattttgtttatttgtttggtggcaatcagtggtagtagggagtgggagggcttatattggtttttccagctattaaggggacatattgtgtcgttgtgcttttcacgttataaaatgtttatatttaccagtacagcactgggctttataaagactgcactcagaaccacactgcacagtccagttttttaaaaagctgctacatgacagacaggtaatcccactgagtgagttttgagaaacaaatcaaacgaagtaaacaagaaacataaaaaccaaatagcaaatgaataaaagcctgttcttgtaacttattcaacttttgccaaattcctaccaatcacttgctttttaaaagaaatgtataatagccaaaagagaaattatgtccctgttgtacagaagttagaatttttgactccaggcagcagtttgctcagtgatcttgaacaagttatccaattgcctctacatttgcatcagtttctctagctgcaaaatggggataatactatatacctacctcacagtgggagggcaggagattttgaggccctgaggttttaggtgggctgtgagggccaacgcttgacacaaagtccatgggttattattcaagaatgcacaggcccatcggccttttagaaagacaagacagggagtgcttgtttgatatttcaaggaataaagccggagctcctgaattgtagtccaccttaaaagagagacctgtattggagaatattttatttttttggcaaatttgatcttaccctttaccagttctataatttggttaaaagctgattatgtcctacaatgtcaaagtcagctaactgtcgtctacttaagacttctggtcatttccaacttatagaggaagggagtctctaaaatctcttcttcagaaggcacctcacttctcagacttaaaattccacatcaagtgttccattaaaagaagataaggcattctgagtgcaaacaaatgggggcttcttaaactacacaccagcagtcagtgaggaaaactttgaacaattattgagttgctttcttgggtctctataatcaataacctgtctgcagatatctatctatataaagatattatatataaatataaatttacatatatatgcacatgtatatatagttgtacatatatgtgtgtatatatatacttaaatgtaatatttacaaaataaaactgtgatctcgtctagagaaaatgtattcatattacaaactgctcttccatatttatgtaccatattatacctttttattattgttataattattatgggtatttctaattaatatgatgttgaaacctgtttggcaccttctggaagctaccaaaaaaatgacactccattgaagtgcttaaaagctgttctcataagaattctactggcctattgtaaaaaagaaaaaaaaaaagaaaaagaagaaagacacaaagaaaataatctaaacaccaaaaactaaacacaattccaatcctttttctgtacctcacgcgcataaatttgctgctcctatttttttttctgtttatgtgtttttatggatctaagttaaatcttttggcaatatataaaaatgtaaatagtaaactttatttattaagaatgtcatcttttttaatttatatttacacaattgttcatctaatttattttttctatacagttttaaatactcagacatattttgctgttcatgatatttttatcctgttctcatggatttgttttcccatactgttttctctgatctcaattacaggttggatctcacaaataataatgtcagagacagaaatattttgccactgttgattactatactttaaagttctatattatgaaaatatataatagcttgtacgcttcaaaaaaaaaaaaaaaaaaaaaaaaaaaaaaaaaaaaaaaaaaaaaaaaaaaaaaaa

SEQ ID NO: 2 - DNA, 4104 bp, Homo sapiens
gtgagagagtgagcgagacagaaagagagagaagtgcaccagcgagccggggcaggaagaggaggtttcgccaccggagcggcccggcgacgcgctgacagcttcccctgcccttcccgtcggtcgggccgccagccgccgcagccctcggcctgcacgcagccaccggccccgctcccggagcccagcgccgccgaggccgcagccgcccggccagtaaggcggcgccgccgcccggccaccgcgcgccctgcgcttccctccgcccgcgctgcggccatggcgcggcgctgactggcctggcccggccccgccgcgctcccgctcgccccgacccgcactcgggcccgcccgggctccggcctgccgccgcctcttccttctccagccggcaggcccgcgccgcttaggagggagagcccacccgcgccaggaggccgaacgcggactcgccacccggcttcagaatggcagaagatgatccatatttgggaaggcctgaacaaatgtttcatttggatccttctttgactcatacaatatttaatccagaagtatttcaaccacagatggcactgccaacagcagatggcccataccttcaaatattagagcaacctaaacagagaggatttcgtttccgttatgtatgtgaaggcccatcccatggtggactacctggtgcctctagtgaaaagaacaagaagtcttaccctcaggtcaaaatctgcaactatgtgggaccagcaaaggttattgttcagttggtcacaaatggaaaaaatatccacctgcatgcccacagcctggtgggaaaacactgtgaggatgggatctgcactgtaactgctggacccaaggacatggtggtcggcttcgcaaacctgggtatacttcatgtgacaaagaaaaaagtatttgaaacactggaagcacgaatgacagaggcgtgtataaggggctataatcctggactcttggtgcaccctgaccttgcctatttgcaagcagaaggtggaggggaccggcagctgggagatcgggaaaaagagctaatccgccaagcagctctgcagcagaccaaggagatggacctcagcgtggtgcggctcatgtttacagcttttcttccggatagcactggcagcttcacaaggcgcctggaacccgtggtatcagacgccatctatgacagtaaagcccccaatgcatccaacttgaaaattgtaagaatggacaggacagctggatgtgtgactggaggggaggaaatttatcttctttgtgacaaagttcagaaagatgacatccagattcgattttatgaagaggaagaaaatggtggagtctgggaaggatttggagatttttcccccacagatgttcatagacaatttgccattgtcttcaaaactccaaagtataaagatattaatattacaaaaccagcctctgtgtttgtccagcttcggaggaaatctgacttggaaactagtgaaccaaaacctttcctctactatcctgaaatcaaagataaagaagaagtgcagaggaaacgtcagaagctcatgcccaatttttcggatagtttcggcggtggtagtggtgccggagctggaggcggaggcatgtttggtagtggcggtggaggagggggcactggaagtacaggtccagggtatagcttcccacactatggatttcctacttatggtgggattactttccatcctggaactactaaatctaatgctgggatgaagcatggaaccatggacactgaatctaaaaaggaccctgaaggttgtgacaaaagtgatgacaaaaacactgtaaacctctttgggaaagttattgaaaccacagagcaagatcaggagcccagcgaggccaccgttgggaatggtgaggtcactctaacgtatgcaacaggaacaaaagaagagagtgctggagttcaggataacctctttctagagaaggctatgcagcttgcaaagaggcatgccaatgcccttttcgactacgcggtgacaggagacgtgaagatgctgctggccgtccagcgccatctcactgctgtgcaggatgagaatggggacagtgtcttacacttagcaatcatccaccttcattctcaacttgtgagggatctactagaagtcacatctggtttgatttctgatgacattatcaacatgagaaatgatctgtaccagacgcccttgcacttggcagtgatcactaagcaggaagatgtggtggaggatttgctgagggctggggccgacctgagccttctggaccgcttgggtaactctgttttgcacctagctgccaaagaaggacatgataaagttctcagtatcttactcaagcacaaaaaggcagcactacttcttgaccaccccaacggggacggtctgaatgccattcatctagccatgatgagcaatagcctgccatgtttgctgctgctggtggccgctggggctgacgtcaatgctcaggagcagaagtccgggcgcacagcactgcacctggctgtggagcacgacaacatctcattggcaggctgcctgctcctggagggtgatgcccatgtggacagtactacctacgatggaaccacacccctgcatatagcagctgggagagggtccaccaggctggcagctcttctcaaagcagcaggagcagatcccctggtggagaactttgagcctctctatgacctggatgactcttgggaaaatgcaggagaggatgaaggagttgtgcctggaaccacgcctctagatatggccaccagctggcaggtatttgacatattaaatgggaaaccatatgagccagagtttacatctgatgatttactagcacaaggagacatgaaacagctggctgaagatgtgaagctgcagctgtataagttactagaaattcctgatccagacaaaaactgggctactctggcgcagaaattaggtctggggatacttaataatgccttccggctgagtcctgctccttccaaaacacttatggacaactatgaggtctctgggggtacagtcagagagctggtggaggccctgagacaaatgggctacaccgaagcaattgaagtgatccaggcagcctccagcccagtgaagaccacctctcaggcccactcgctgcctctctcgcctgcctccacaaggcagcaaatagacgagctccgagacagtgacagtgtctgcgacagcggcgtggagacatccttccgcaaactcagctttaccgagtctctgaccagtggtgcctcactgctaactctcaacaaaatgccccatgattatgggcaggaaggacctctagaaggcaaaatttagcctgctgacaatttcccacaccgtgtaaaccaaagccctaaaattccactgcgttgtccacaagacagaagctgaagtgcatccaaaggtgctcagagagccggcccgcctgaatcattctcgatttaactcgagaccttttcaacttggcttcctttcttggttcataaatgaattttagtttggttcacttacagatagtatctagcaatcacaacactggctgagcggatgcatctggggatgaggttgcttactaagctttgccagctgctgctggatcacagctgctttctgttgtcattgctgttgtccctctgctacgttcctattgtcattaaaggtatcacggtcgccacctggcattccttctgaccacagcatcattttgcattcaaattaagggttaagaaaagagatattttaaaatgagagtcacttgatgtgccattttaaaaaaaaaggcatattgctttttctaatgtggttatttctctgatttgcaaaaaaaaaaaaaaaaaaaaaatacttgtcaatatttaaacatggttacaatcattgctgaaaatggtattttcccccttttctgcattttgctattgtaaatatgttttttagatcaaatactttaaaggaaaaaatgttggatttataaatgctattttttattttacttttataataaaaggaaaagcaaattgatgacctcaaaaaaaaaaaaaaaaaa

SEQ ID NO: 3 - DNA, 4618 bp, Homo sapiens
gccacgctcgggtcgggggcgggctgacgccgccgccgccgcgggaggagggacaaaggggtgggtccccgcgggtcggcaccccggcggttgggctgcgggtcagagcactgtccggtggtgcccaggaggagtaggagcaggagcagaagcagaagcggggtccggagctgcgcgcctacgcgggacctgtgtccgaaatgccggtgcgaggagaccgcgggtttccaccccggcgggagctgtcaggttggctccgcgccccaggcatggaagagctgatatgggaacagtacactgtgaccctacaaaaggattccaaaagaggatttggaattgcagtgtccggaggcagagacaacccccactttgaaaatggagaaacgtcaattgtcatttctgatgtgctcccgggtgggcctgctgatgggctgctccaagaaaatgacagagtggtcatggtcaatggcacccccatggaggatgtgcttcattcgtttgcagttcagcagctcagaaaaagtgggaaggtcgctgctattgtggtcaagaggccccggaaggtccaggtggccgcacttcaggccagccctcccctggatcaggatgaccgggcttttgaggtgatggacgagtttgatggcagaagtttccggagtggctacagcgagaggagccggctgaacagccatggggggcgcagccgcagctgggaggacagcccggaaagggggcgtccccatgagcgggcccggagccgggagcgggacctcagccgggaccggagccgtggccggagcctggagcggggcctggaccaagaccatgcgcgcacccgagaccgcagccgtggccggagcctggagcggggcctggaccacgactttgggccatcccgggaccgggaccgtgaccgcagccgcggccggagcattgaccaggactacgagcgagcctatcaccgggcctacgacccagactacgagcgggcctacagcccggagtacaggcgcggggcccgccacgatgcccgctctcggggaccccgaagccgcagccgcgagcacccgcactcacggagccccagccccgagcctagggggcggccggggcccatcggggtcctcctgatgaaaagcagagcgaacgaagagtatggtctccggcttgggagtcagatcttcgtaaaggaaatgacccgaacgggtctggcaactaaagatggcaaccttcacgaaggagacataattctcaagatcaatgggactgtaactgagaacatgtctttaacggatgctcgaaaattgatagaaaagtcaagaggaaaactacagctagtggtgttgagagacagccagcagaccctcatcaacatcccgtcattaaatgacagtgactcagaaatagaagatatttcagaaatagagtcaaaccgatcattttctccagaggagagacgtcatcagtattctgattatgattatcattcctcaagtgagaagctgaaggaaaggccaagttccagagaggacacgccgagcagattgtccaggatgggtgcgacacccactccctttaagtccacaggggatattgcaggcacagttgtcccagagaccaacaaggaacccagataccaagaggaccccccagctcctcaaccaaaagcagccccgagaacttttcttcgtcctagtcctgaagatgaagcaatatatggccctaataccaaaatggtaaggttcaagaagggagacagcgtgggcctccggttggctggtggcaatgatgtcgggatatttgttgctggcattcaagaagggacctcggcggagcaggagggccttcaagaaggagaccagattctgaaggtgaacacacaggatttcagaggattagtgcgggaggatgccgttctctacctgttagaaatccctaaaggtgaaatggtgaccattttagctcagagccgagccgatgtgtatagagacatcctggcttgtggcagaggggattcgttttttataagaagccactttgaatgtgagaaggaaactccacagagcctggccttcaccagaggggaggtcttccgagtggtagacacactgtatgacggcaagctgggcaactggctggctgtgaggattgggaacgagttggagaaaggcttaatccccaacaagagcagagctgaacaaatggccagtgttcaaaatgcccagagagacaacgctggggaccgggcagatttctggagaatgcgtggccagaggtctggggtgaagaagaacctgaggaaaagtcgggaagacctcacagctgttgtgtctgtcagcaccaagttcccagcttatgagagggttttgctgcgagaagctggtttcaagagacctgtggtcttattcggccccatagctgatatagcaatggaaaaattggctaatgagttacctgactggtttcaaactgctaaaacggaaccaaaagatgcaggatctgagaaatccactggagtggtccggttaaataccgtgaggcaaattattgaacaggataagcatgcactactggatgtgactccgaaagctgtggacctgttgaattacacccagtggttcccaattgtgatttttttcaacccagactccagacaaggtgtcaaaaccatgagacaaaggttaaatccaacgtccaacaaaagttctcgaaagttatttgatcaagccaacaagcttaaaaaaacgtgtgcacacctttttacagctacaatcaacctaaattcagccaatgatagctggtttggcagcttaaaggacactattcagcatcagcaaggagaagcggtttgggtctctgaaggaaagatggaagggatggatgatgaccccgaagaccgcatgtcctacttaaccgccatgggcgcggactatctgagttgcgacagccgcctcatcagtgactttgaagacacggacggtgaaggaggcgcctacactgacaatgagctggatgagccagccgaggagccgctggtgtcgtccatcacccgctcctcggagccggtgcagcacgaggagagcataaggaaacccagcccagagccacgagctcagatgaggagggctgctagcagcgatcaacttagggacaatagcccgcccccagcattcaagccagagccgcccaaggccaaaacccagaacaaagaagaatcctatgacttctccaaatcctatgaatataagtcaaacccctctgccgttgctggtaatgaaactcctggggcatctaccaaaggttatcctcctcctgttgcagcaaaacctacctttgggcggtctatactgaagccctccactcccatccctcctcaagagggtgaggaggtgggagagagcagtgaggagcaagataatgctcccaaatcagtcctgggcaaagtcaaaatatttgagaagatggatcacaaggccaggttacagagaatgcaggagctccaggaagcacagaatgcaaggatcgaaattgcccagaagcatcctgatatctatgcagttccaatcaaaacgcacaagccagaccctggcacgccccagcacacgagttccagaccccctgagccacagaaagctccttccagaccttatcaggataccagaggaagttatggcagtgatgccgaggaggaggagtaccgccagcagctgtcagaacactccaagcgcggttactatggccagtctgcccgataccgggacacagaattatagatgtctgagcacggactctcccaggcctgcctgcatggcatcagactagccactcctgccaggccgccgggatggttcttctccagttagaatgcaccatggagacgtggtgggactccagctcgtgtgtcctcatggagaacccaggggacagctggtgcaaattcagaactgagggctctgtttgtgggactgggttagaggagtctgtggctttttgttcagaattaagcagaacactgcagtcagatcctgttacttgcttcagtggaccgaaatctgtattctgtttgcgtacttgtaatatgtatattaagaagcaataactatttttcctcattaatagctgccttcaaggactgtttcagtgtgagtcagaatgtgaaaaaggaataaaaaatactgttgggctcaaactaaattcaaagaagtactttattgcaactcttttaagtgccttggatgagaagtgtcttaaattttcttcctttgaagctttaggcagagccataatggactaaaacattttgactaagtttttataccagcttaatagctgtagttttccctgcactgtgtcatcttttcaaggcatttgtctttgtaatattttccataaatttggactgtctatatcataactatacttgatagtttggctataagtgctcaatagcttgaagcccaagaagttggtatcgaaatttgttgtttgtttaaacccaagtgctgcacaaaagcagatacttgaggaaaacactatttccaaaagcacatgtattgacaacagttttataatttaataaaaaggaatacattgcaatccgtaaaaaaaaaaaaaaaaa

SEQ ID NO: 4 - DNA, 3668 bp, Homo sapiens
gggggctggagagagtgaggaggaaggggaggaggtgccgtcccacaataccaggcgggagggcgggtaggcggtttgtatccgggctgtgaggtgctcggagcctcggcggaccttgctgcctctgtctctttaacgcgagaggaagcgatgcagaggggtggaaaatggcagagctgcagatgttactagaggaggagatcccgtctggcaagagggcgctgatcgagagttaccagaacctgactcgggtggcagactactgtgaaaacaactacatacaggctacagacaagagaaaagctttagaggagaccaaagcctatacaacccaatctctagctagtgttgcttatcaaataaatgcattggccaacaatgtactccagttgctggatatccaagcctctcagcttcggagaatggagtcttccatcaatcatatctcacagactgtggatattcataaggagaaagtggcacgaagagagattggtattttgacaacaaataagaatacatcaagaactcacaaaataatagcacctgcgaatatggagcgccctgtaaggtatattcggaaacctatcgattacacagttctggatgatgtgggccatggtgtcaagtggctaaaagccaagcatggaaataaccagcctgcaagaactggcacactgtcgagaacaaatcctcctactcagaaaccgccaagtcctcccatgtcaggccggggaacactgggacggaatactccttataaaaccctggaacctgttaaacccccaacagttcctaatgactatatgaccagtcctgctaggcttggaagtcagcatagtccaggcaggacagcatctttaaatcagagaccaaggacacacagtggaagtagtggaggaagtggaagtcgagaaaacagtggtagcagtagtattggcattcccattgctgtgcctacaccttcgccacccactattggaccagaaaacatttctgtccctcctccttctggagctccaccagcaccacctctggcaccacttctcccagtgagcactgtgatagcagccccgggctcagctcctggttcccagtatggcacaatgaccaggcagatatctcgacacaactctactacttcttcgacatcttctggtggatacagacgaactccctctgtgactgctcaattttctgctcagcctcatgttaatggaggtccactttattctcaaaattcaatttctattgctccaccccctccccctatgcctcagttgactccacagatacctctcacaggcttcgtggccagggtgcaggaaaacattgctgatagtccaactccaccgccaccacctccaccagatgacattcccatgtttgatgactctccacctcccccaccaccaccaccagtggattatgaagatgaggaggctgcagtagttcagtataatgatccatatgcagatggggatcctgcttgggcccccaagaattatattgagaaagttgttgcaatatatgattatacaaaagacaaggatgatgagctgtcatttatggagggtgcaatcatttatgttataaagaagaatgatgatggctggtatgaaggagtctgcaatcgagtgactggtctgttccctgggaactatgttgaatcaatcatgcactatactgattaatttttttttttcttttgaagtagattcttattactcagtcatactgtgggactattatggttaacagaactgtcttaatatgttttaaaatgtgcccatattttcagaacatgctgttttattggtaaattgaatgtctacctgtaagcataaatctttgaggcagtttatgtattgctgaatagcaatttatacaagaagctgtccataactgattatgcttatgtacttacttacacatttttaactttatgaccagcctaaatattctgggggaagtggggtataatatttaacgaatcatgattcagattgtaccattacatgtttcagtgcagcatggttactaacgctatgtcagactaatattaaaatcagaaaatttaaatgctggtgctggtcagactttttttgttagattctctcatttaaaaaaaatactgtttgtttaaagcatgcataaaaatttatgtattgaaatatacttaaaaattcaagatgcttcccatttgtgtaatatttacctggaggactcgtacttaggtgtcttaacgtgaattgagtctccaaggtctccatgtgaaacaagcaaaaagagaattatctgtaatgttgtaatttgtacctaagttttttaatgagtgaaatttgcattataaactttttccattcataaatacataagtgaaccaaaggtttttgtcctttccttcactgatttgctttaaaaaaaataaaagataatgatttattgcagaattatgattctattttctcaatatgttaacttggaaaaaaattttagccttatcttaatctgtcccaacagcaatgtgacggatttttgcagattcaaaatctgcaatggttatttacaagtcaatctactgaattccttttttaaataatcttttgaaactaagaaaatgtgtcaaattgtgtgcattcattctgtaggtaaaattcttaaggattgccatgtcagtccttcagttgtacagtgaactgttgtacactggttcaatgaaaggaagttaaaagtaccttttacatattgtaaaagtggatacagttgatttgtgagtaggcactctttaatccattacctggcactagcaacattagaattttaaaataaaataattgggaaagaaggtgggtcatgtattaatcagtgaacagagatttacctaaccaacagacttggattgtcttttgacataatcaaaatgcaacacatgcactttgtgtgtctcctcttaattgaagggagggctgagggatgttttctcttcttgtcttgtgtataattctctattgcttaggatattaaagtagagcactcaagtgtgggtttctgtgttattgaggatttgtttggaattcaaattacagttatgtactggatgctacagacttataacagcatagtgaatggtaagactagtgcaaaacagttatttctgaaaattaaagaccattattgctaccaaatcaatgtgactatttcatatgcattttgcctttgttaattttaaacaaacaaagtatcattagtgatcagctagctaccttctactttccatttttcaagtggattgttctcttaatttgtatataacctgttgtctaaattttatgtacagtcttttataataaaccattctcctatatgaaattttggatactgttaaaatataactcatgtggacttcaatgcagacttcacatttttctgacctttactcctacggtaaatcaagacaaaccatttgaattttaacattggttatttatttgtgtaatggccttacatgtggatattaacagtgtaaacaataccacatataaccatcaagataccttgattataatttataggactagaatgacagattcaggtggtttattaattacatttaaaaagttttctgaaaaaacttttgcaataaaaaaaaataaattgcccatcaa

SEQ ID NO: 5 - DNA, 1783 bp, Homo sapiens
cctctcggagctggaaatgcagctattgagatcttcgaatgctgcggagctggaggcggaggcagctggggaggtccgagcgatgtgaccaggccgccatcgctcgtctcttcctctctcctgccgcctcctgtgtcgaaaataacttttttagtctaaagaaagaaagacaaaagtagtcgtccgcccctcacgccctctcttcctctcagccttccgcccggtgaggaagcccggggtggctgctccgccgtcggggccgcgccgccgagccccagcgccccgggccgcccccgcacgccgcccccatgcatcccttctacacccgggccgccaccatgataggcgagatcgccgccgccgtgtccttcatctccaagtttctccgcaccaaggggctgacgagcgagcgacagctgcagaccttcagccagagcctgcaggagctgctggcagaacattataaacatcactggttcccagaaaagccatgcaagggatcgggttaccgttgtattcgcatcaaccataaaatggatcctctgattggacaggcagcacagcggattggactgagcagtcaggagctgttcaggcttctcccaagtgaactcacactctgggttgacccctatgaagtgtcctacagaattggagaggatggctccatctgtgtgctgtatgaagcctcaccagcaggaggtagcactcaaaacagcaccaacgtgcaaatggtagacagccgaatcagctgtaaggaggaacttctcttgggcagaacgagcccttccaaaaactacaatatgatgactgtatcaggttaagatatagtctgtggatggatcatctgatgatgatccataaatttgatttttgctttgggtgggctcctcttggggatggattatggaatttaaaccatgtcacagctgtgaagatctggcacaagatagaatggtaaaaaaaaaaaaaaattttaagtgacagtgccatagtttggacagtacctttcaatgattaattttaatagcctgtgagtccaagtaaatgatcactttatttgctagggagggaagtcctagggtggtttcagtttctcccagacatacctaaatttttacatcaatccttttaaagaaaatctgtatttcaaagaatctttctctgcagtaaatctcgcaggggaatttgcactattacacttgaaagttgttattgttaaccttttcggcagcttttaataggaaagttaaacgttttaaacatggtagtactggaaattttacaagacttttacctagcacttaaatatgtataaatgtacataaagacaaactagtaagcatgacctggggaaatggtcagaccttgtattgtgtttttggccttgaaagtagcaagtgaccagaatctgccatggcaacaggctttaaaaaagacccttaaaaagacactgtctcaactgtggtgttagcaccagccagctctctgtacatttgctagcttgtagttttctaagactgagtaaacttcttatttttagaaagtggaggtctggtttgtaactttccttgtacttaattgggtaaaagtcttttccacaaaccaccatctattttgtgaactttgttagtcatcttttatttggtaaattatgaactggtgtaaatttgtacagttcatgtatattgattgtggcaaagttgtacagatttctatattttggatgagaaatttttcttctctctataataaatcgtttcttatcttggcatttttaacc

SEQ ID NO: 6 - DNA, 1125 bp, Homo sapiens
ttctgccctcgagcccaccgggaacgaaagagaagctctatctcgcctccaggagcccagctatgaactccttctccacaagcgccttcggtccagttgccttctccctggggctgctcctggtgttgcctgctgccttccctgccccagtacccccaggagaagattccaaagatgtagccgccccacacagacagccactcacctcttcagaacgaattgacaaacaaattcggtacatcctcgacggcatctcagccctgagaaaggagacatgtaacaagagtaacatgtgtgaaagcagcaaagaggcactggcagaaaacaacctgaaccttccaaagatggctgaaaaagatggatgcttccaatctggattcaatgaggagacttgcctggtgaaaatcatcactggtcttttggagtttgaggtatacctagagtacctccagaacagatttgagagtagtgaggaacaagccagagctgtgcagatgagtacaaaagtcctgatccagttcctgcagaaaaaggcaaagaatctagatgcaataaccacccctgacccaaccacaaatgccagcctgctgacgaagctgcaggcacagaaccagtggctgcaggacatgacaactcatctcattctgcgcagctttaaggagttcctgcagtccagcctgagggctcttcggcaaatgtagcatgggcacctcagattgttgttgttaatgggcattccttcttctggtcagaaacctgtccactgggcacagaacttatgttgttctctatggagaactaaaagtatgagcgttaggacactattttaattatttttaatttattaatatttaaatatgtgaagctgagttaatttatgtaagtcatatttatatttttaagaagtaccacttgaaacattttatgtattagttttgaaataataatggaaagtggctatgcagtttgaatatcctttgtttcagagccagatcatttcttggaaagtgtaggcttacctcaaataaatggctaacttatacatatttttaaagaaatatttatattgtatttatataatgtataaatggtttttataccaataaatggcattttaaaaaattc

SEQ ID NO: 7 - DNA, 2243 bp, Homo sapiens
ggacgtcgaggcattacaatcgcgaaaccaagccatagcatgaaacagcgagcttgcagcctcaccgacgagtctcaactaaaagggactcccggagctaggggtggggactcggcctcacacagtgagtgccggctattggacttttgtccagtgacagctgagacaacaaggaccacgggaggaggtgtaggagagaagcgccgcgaacagcgatcgcccagcaccaagtccgcttccaggctttcggtttctttgcctccatcttgggtgcgccttcccggcgtctaggggagcgaaggctgaggtggcagcggcaggagagtccggccgcgacaggacgaactcccccactggaaaggattctgaaagaaatgaagtcagccctcagaaatgaagttgactgcctgctggctttcctgttgactggcccggagctgtactgcaagacccttgtgagcttccctagtctaagagtaggatgtctgctgaagtcatccatcaggttgaagaagcacttgatacagatgagaaggagatgctgctctttttgtgccgggatgttgctatagatgtggttccacctaatgtcagggaccttctggatattttacgggaaagaggtaagctgtctgtcggggacttggctgaactgctctacagagtgaggcgatttgacctgctcaaacgtatcttgaagatggacagaaaagctgtggagacccacctgctcaggaaccctcaccttgtttcggactatagagtgctgatggcagagattggtgaggatttggataaatctgatgtgtcctcattaattttcctcatgaaggattacatgggccgaggcaagataagcaaggagaagagtttcttggaccttgtggttgagttggagaaactaaatttggttgccccagatcaactggatttattagaaaaatgcctaaagaacatccacagaatagacctgaagacaaaaatccagaagtacaagcagtctgttcaaggagcagggacaagttacaggaatgttctccaagcagcaatccaaaagagtctcaaggatccttcaaataacttcaggctccataatgggagaagtaaagaacaaagacttaaggaacagcttggcgctcaacaagaaccagtgaagaaatccattcaggaatcagaagcttttttgcctcagagcatacctgaagagagatacaagatgaagagcaagcccctaggaatctgcctgataatcgattgcattggcaatgagacagagcttcttcgagacaccttcacttccctgggctatgaagtccagaaattcttgcatctcagtatgcatggtatatcccagattcttggccaatttgcctgtatgcccgagcaccgagactacgacagctttgtgtgtgtcctggtgagccgaggaggctcccagagtgtgtatggtgtggatcagactcactcagggctccccctgcatcacatcaggaggatgttcatgggagattcatgcccttatctagcagggaagccaaagatgttttttattcagaactatgtggtgtcagagggccagctggagaacagcagcctcttggaggtggatgggccagcgatgaagaatgtggaattcaaggctcagaagcgagggctgtgcacagttcaccgagaagctgacttcttctggagcctgtgtactgcggacatgtccctgctggagcagtctcacagctcaccgtccctgtacctgcagtgcctctcccagaaactgagacaagaaagaaaacgcccactcctggatcttcacattgaactcaatggctacatgtatgattggaacagcagagtttctgccaaggagaaatattatgtctggctgcagcacactctgagaaagaaacttatcctctcctacacataagaaaccaaaaggctgggcgtagtggctcacacctgtaatcccagcactttgggaggccaaggagggcagatcacttcaggtcaggagttcgagaccagcctggccaacatggtaaacgctgtccctagtaaaaatgcaaaaattagctgggtgtgggtgtgggtacctgtgttcccagttacttgggaggctgaggtgggaggatcttttgaacccaggagttcagggtcatagcatgctgtgattgtgcctacgaatagccactgcataccaacctgggcaatatagcaagatcccatctctttaaaaaaaaaaaaaa

SEQ ID NO: 8 - DNA, 7091 bp, Homo sapiens
cgccgacccaagcggaagtgacgttaggtgtccgccggaggtgtcgttggtgtgttgcgcgactggccttgagggagagctggggcctgctcccggagagatacggctatgtcgatcgaaatcgaatcttcggatgtgatccgccttattatgcagtacttgaaggagaacagtttacatcgggcgttagccaccttgcaggaggagactactgtgtctctgaatactgtggacagcattgagagttttgtggctgacattaacagtggccattgggatactgtgttgcaggctatacagtctctgaaattgccagacaaaaccctcattgacctctatgaacaggttgttctggaattgatagagctccgtgaattgggtgctgccaggtcacttttgagacagactgatcccatgatcatgttaaaacaaacacagccagagcgatatattcatctggagaaccttttggccaggtcttactttgatcctcgtgaggcatacccagatggaagtagcaaagaaaagagaagagcagcaattgcccaggccttagctggcgaagtcagtgtggtgcctccatctcgtctcatggcattgctgggacaggcactgaagtggcagcagcatcagggattgcttcctcctggtatgaccatagatttgtttcgaggcaaggcagctgtcaaagatgtggaagaagaaaagtttcctacacaactgagcaggcatattaagtttggtcagaaatcacatgtggagtgtgctcgattttctccagatggtcagtatttggtcactgggtctgttgatggattcattgaagtatggaactttactactggaaaaatcagaaaggatcttaagtaccaggcccaagataactttatgatgatggatgatgctgtcctctgcatgtgtttcagcagagatacagaaatgttagcaactggggcccaagatggaaaaatcaaggtgtggaagattcagagtggacaatgtttaaggagatttgagagggcacacagtaagggtgtcacctgtctaagcttttctaaggatagcagtcagatccttagtgcttcttttgaccagacaattagaattcatggtttaaaatctgggaaaaccctgaaggaatttcgtggccattcctcctttgttaacgaagcaacatttacacaagatggacattacattattagtgcatcctctgatggcactgtaaagatctggaatatgaagaccacagaatgttcaaatacctttaaatccctgggcagcaccgcagggacagatattaccgtcaacagtgtgattctacttcctaaaaaccctgagcactttgtggtgtgcaacagatcaaacacggtggtcatcatgaacatgcaggggcagattgtcagaagcttcagttctggtaaaagagaaggtggggactttgtttgctgtgccctctctccccgtggtgaatggatctactgtgtaggggaggactttgtgctctactgtttcagtacagtcactggcaaactggagagaactttgacagtgcacgagaaggatgtgattggtattgcacatcaccctcatcagaacctgattgctacctacagtgaagatggactcctaaagctctggaaaccataattcaacttttctttttaaatcagctcgaaagcatgtacttaaatgaagcatattcatgtaatgtgcttttttttttttttgccagcttttctaagcaaatagattgtctgaattagtcacagaataattttgtgaaaattcatgtttaagtagcaactaccctttctttttttatatatttttaaggtattagtttatcttcttctaactggtgcagtcacttaatgttttcattaatcttcgacctggagagtgaaatactgatatttctagaaaaaaattctactcctctgattatttgaaatgctgaggaaaatgtccctcccatagtaaaacttgtaaataaggaactatatcatattcagtagctgtgttctgttccatctttttttttttttttgagatggagttttgcttgttgcccaggctggagtgcagcggcacgatcttggttcactgcaacctccgcctcccaggttcaagcgattctcttgcctcagcctcccgagtagctggggactacaggtgtgcgacaccatgcctggctaatttttttgtatttttagtagagatggggtttcaccatgttggccaggctggtctcaaactcctgacctcaaaggatccacccgccttggcctcccaaagtgctgggatcacaggcgtgagccaccatgcccggcccatctttttttttttttttttttttaaagatgttaataaactttatacctttctggagactttgttctaaaatgtacataaatgctcatctagttaacatatttacttagaatgtgggaggaggagtcacattattatccctgaatctcaagtacagcagaagtgaattcctgggatagtaggatagactaacatgtaaaaaggccaggtgatgcataggttctcatttcactgccctcagccttcctctccttctgagctgtgccttctcacatgttcagtcaactccagggaatattgtctccatcttctggatagaactagttgcaggatccgttacaagaattcagagttttggcatctcccctttgtatgttgtaggagaaggtttggcattgaaaatgtgctgttgttccaaagaaaaattagcaaaggacttgagatttagaaaagtctcctttgtaatgtgcatcattaccagttatctaaagaaaaacatgtaaaagccaacaaaacccttgaaaatattttgcatatggatgtctgtttcacgtttcaactgaagatgtatagagcacctctgatgatgaggaagataccatgctaggcagtactttcaagaacgtgagttcttatttctgcaggccttttgtgcccccttttaaatgttagcatttattaggtacaaactagtggggaaggtttttttaaaaagttttgcagtcttgtaatttacctttttaaaaaatttattttatttttctgagatggagtcttgctctgttgcccaggctggagtgcagtggtgccatctcagctaactgcaacttccacttcccaggttcaagcgattctcctgccttagcctcccaagtagctgggactacaggcgcatgccagcatgcctggctaatttttgtatttttagtagagcgggggttttgccatgttggccaggctggtcttgaactcctgacctcaggtgatccgcctgccctggcctcccaaagtgctgggattacaggcatgagccactgcgcccagccttgtaatttacctttgatggtgacctgaaatgcagtatgatcctatatgtggcacgtagtaatgttcagtgtttgctgaattaattctgggcagcactaagaaatccctctttcccagtcatattctataacacatttcccatttgccacaaaacctgcagctttttggtccaggtaatgacatttgctgccattttgatgatttaaaaatggtcgtgggagttgaacatagtcatgaattcaggattcctgagcatgtagacagtcatcccagtggaaagacacgttcacttaagagaagtttaagttagaggaaacagtttatgctaaaaaaatttttagaaaagtccttgagaatttttgatttagtcttgacctcatgaagctggtagttatgatgtgcatagtttgtatcaccgtttatgaagatggagaatctagtcagcacgtgttggtttattctaggaatttttagggaacacttctgttgctggcaccaggtgatgaatatggttaaaaaaagactcgtttctgcctaaacatagggaagaagagcaaattaaaaggagtaattaaaactgataaaagctcaagttacctttgtgatgatgaggcgggcagttaacgcgaaagggttgggaaaggcttcctggagggactagggggcggtctaagcacagggaacctaaccggggactccagtgtggcacagcggcaaggtatgtgctgggcaaaatgataggtgtcttgggagaccaggcaaagagagctggattaggagccgttaagtatatatttttcttctttttaaataaaataatgcactgggtgaacatgtaaacgctaagttgaaaatctgcctttcccaggtaacccttgttaatctttctacaacttcatttcgtacaaacctgaaaaacacactgattttgtctttaaatgggcacacgctgcttacactcctcggcgcctagcctttctgaagccccacgcggccgtccctccagcattgaaggctggggcagcccagctcccctccagcgcccttacagccagaccgcggcggggtcgggccgcgcacgcgcagggcggacggccggatctggggcgccgctgctccgggtggtcggaggtaggagtcccatcttgggtccagggccggtagagccccttaccgggggtagggagactgcgcacccgctagagccaactgtcagggcctgcagacgtcgggtgacgtcactgttacaaaattggcggtcacatcgtcttaagggccggtggcagcggctgcgcgaacgggagttggctgccgggaatcagtgctcacttccttctgaattgggcgtgtgcagtcggttcctagggaagtgctctgctgcagccaccagatttaacggatgctgctctctagcacttaacatagaagctaaactacctggcgttaaaattaattccatgagcataaggacatttgtcctatcccctattctgctgttgaattaatgactggaaaacattgcgcggaggtatttgggagtagtatggctttttttttttttttttttttaacagcaaatggtataaatctcaggtacaattcagtatcttcttcaccagttgttttttttcagcatgtattattactaccactaacggcctctgttgagcccttccttgctatgtaagcagccatatttaattctcagaacaatgtaatgagggtgcgcaaatgcacatgaagaaacaggtttccagacgtgaggcacctaactcagtccaacttgcacgaagctcgcattgaaaaccagatgtgactccgaagctaggttttttttctctcttgcctcactctcaatattgctgtcagttcctcctcaatctttaggtttgggcagggacaaagaatacatggattgttcctccacatgctgcaaacacattcacctaagcagagcacaggtagtgagatgagtagagagaactgaattagaggattctggatgtcagtctttgctgtcacttcttttggcttgtgctagaacagtggttcttacaagtgtcacgtgatagacacattctaaggtcctatcccagacctacagaatcagaaattggtggtggggcccagcaagcgtgctcaaatttgagagcaggtagactacagggtagtttccgcatatacaaaaggtgttttaattcttgctgtcagtctcagaagtttcatgctgagataaccaaatttaaatgataaaggtgcaagactgactcttaaaatcacattttttcaaattgccatagcttgctagtgttctcattcactgtgcttttacagcttcattttccactattttaagagaagaaattgctatgaagtgtatgtccaagtgaggaagttccctggtctgaggttgtttaaaacttacaataggccgggcacggtggctcaagcctgtaatcccagcactttgggaggccgaggtgggtggatcacgaggtcaggagttcaagaccaccctggccaacatggtgacaccctgtctctactaaggatacaaaattagccgggcatggtggcacacgcctgtagtcccagctacctaggaggctgaggcaggagaatagctggaacccgggaggcagaggttgcagtgagctgagactgtgccactgcactccagcctgggtgacagagcaagacttggtctcaaaaacaaaaaacaaaaaaaccaaacttggaatagcaagggctgcccattatttaaccttccacggcaattttaacagtggtattctgttccaagtggttaatattaaatccatgtgtcagtgttggtggctttcaaccttggctgcgcataatcattttgatgcttaggctacacccagccgagttatacagaatccctggagggtgggacctgatgagtgttttaatgtttcccgggtaattccaatggtagccaaggttaagaaccagtaccgtacgtacaaaaaagttgagaagctaatttcacgtacagaaaatttgccactgttccaagagcactctcaagcgacataattggcctctactcctattccctacaagtatgaatgggcaggagaagcatcacagagaaagcagagttagtgctggaacttgtatttttgtggatgatgaccttggttaatgttttttcataggctctgtttcataggctttgttttttcataggctctccctcattacattgttctgagaattaaatatggctgcttacatagtaatgaagggttcaacagaggctgttagtggtagtaataatacaagctgaaaaactacacagacaaacctatcagtttctgcctcttcaggatataactattaggttagtgcaaaagtaattgcggtttttgccattaaaagtaatggcacattacttttgcaccaaccgacctaatatgactttcttttagtgttcttaggatttttaattgtaaaacatgtaacaaattttcctaaacaattgtgcaattcagtggcattatttacgatgttacgcaaccactattgtatttccaaaatgtcatcaccctaaacagaagccctgtaacattgtcaattaacttctccttcccttcccctcagcctttggtactgtttctgcctcaatgcatttgtctaagtttagttcatataagtgaaattatacaatacttgtccttttt

SEQ ID NO: 9 - DNA, 738 bp, Homo sapiens
agtctcagattggtaaacacccgaactggtcaactctcaagagaccatctggttcaggttcctgactgggccagcgagtgaggatggccaggcctctggagcaggcggtagctgccatcgtgtgcaccttccaggaatacgcagggcgctgtggggacaaatacaagctctgccaggcggagctcaaggagctgctgcagaaggagctggccacctggaccccgactgagtttcgggaatgtgactacaacaaattcatgagtgttctggacaccaacaaggactgcgaggtggactttgtggagtatgtgcgctcacttgcctgcctctgtctctactgccacgagtacttcaaggactgcccctcagagcccccctgctcccagtagcctctgctccagggggtgcgctggctgtcgggggctgggcatgtctcccacaccccctcctaccctctctcctgtacccctttcaatctggacttgcccaggtcttctgcgatcagttaacccattttacctaggaggcccagagatgtgagggctccttcctcaggatgcccagcgaatgaggggtagagccactctggggcccagcctgcctgccgcacccctgtggcctcccttgtggatgggaggaggcgggatctgctctgaggccctcgaggctcagcagagcgtgcaccaatgagaccacgatgggaaagggcctatttaactcctaataaaaaactggcat

SEQ ID NO: 10 - DNA, 12877 bp, Homo sapiens
ccagcccctgcccacttacgatgaggtgctgctctgcaccccggcaaccacctttgaggaggtggcactgttgctgcgccgctgcctgaccctgggctccctggggcacaaggtctacagcctgctgttcgcagatcagctgagctacgaggtggcacgccaagcggaggagcttttccacaatctgtgcacgcagcagcaccgagaagactaccagctcgtcatggtctgtgatggggactgggagcactgctacctcccctctgccttcagccagcacaaggtcttcgtcaccccccaggcacccctcgaggccatccaagcctacctggcaggtcactaccgggtcccgaagcagaccctgtcggcggcagccgtgttcaatgaccggctgtgtgttgggatcgtggcctcggagcgagcaggtgttggaaagtctctgtacgtgaagaggttgcacgacaaaatgaagatgcagttaaacgtgaaaaatgtgcctctgaaaacaattcgactgatcgaccctcaggtggatgagagccgagtcctgggcgccctgctgcccttcctggatgcgcagtatcagaaggtccccgtgctctttcacctggacgtgacctcctcagtgcagactggaatttgggtgtttcttttcaagctcctcattttacaatacttaatggatataaatgggaaaatgtggcttcggaacccctgccatttgtatatcgttgaaatcctggaaaggaggacgtcagtgccgtcgaggagctcttcagcgctgcgtacacgtgtaccccagttcagttttcttgacatcttcccaaaagtcacctgcaggcctcccaaagaggtgatagacatggagctgagtgccctgaggagtgacacagagcctgggatggatctgtgggagttctgcagcgaaactttccaaagaccttaccagtatttaagacgattcaatcaaaaccaagacctagacacgtttcagtatcaagaaggctctgtcgaaggcaccccggaggaatgcctccagcatttcctgtttcactgcggggtaataaacccatcctggtcagagcttcggaactttgctcggttcctgaattatcagctcagagattgtgaggcctctctcttctgcaatccgagttttattggcgacacactgaggggcttcaagaagttcgtggtgaccttcatgatctttatggcaagagattttgccacaccatcactccacacctctgaccaaagcccggggaagcacatggtcaccatggatggggttagggaagaagatctagcgcccttctccctccggaagaggtgggagtcggagcctcacccatacgttttcttcaatgacgaccacacaaccatgacattcatcggcttccatctgcagcccaacatcaacggcagtgtcgatgccatcagtcacttgactgggaaggtcatcaagagagacgtcatgaccagggacctgtaccagggcctgctgctccagagggtgcccttcaatgtcgactttgataaactgcccagacacaagaaacttgagaggctctgcctgaccttagggatcccccaggccaccgaccccgacaaaacgtatgagctcacaaccgacaatatgcttaaaatccttgccatcgagatgcggttccggtgtgggatcccggttatcatcatgggagaaactggctgtgggaaaaccaggcttattaaattccttagcgacctgcggcgtggtggtaccaatgctgacaccataaagctggtcaaggtgcacggaggaacaactgcagacatgatctactccagagtcagggaggctgaaaatgtggccttcgccaataaggaccaacatcagttggacaccatcttgttttttgatgaagccaacacaacggaagctataagctgtatcaaagaagtcctgtgtgatcatatggtggatggccagcctctggctgaggactctggcctgcatattatagctgcctgcaatccataccggaagcactctgaggagatgatctgccgtttggagtcagctggtttgggctacagggttagtatggaggagacggccgacaggctgggctccattcctctgaggcagctggtataccgggtccatgctctgcccccgagcctgattcctctggtgtgggactttggacaactgagtgacgttgctgaaaagctctacatccagcagattgtccagagactggttgagtccatcagcctagatgaaaacgggactcgcgtgatcacagaagtcctctgcgcctctcagggtttcatgaggaaaacagaagatgagtgcagctttgtcagcctcagggacgtggagcgctgtgtgaaagttttcaggtggttccacgagcacagcgcgatgctcttagcgcagctgaatgcctttctctccaagtccagcgtcagcaaaaatcacaccgagagagatcccgtcctctggtcgttgatgctggccatcggggtgtgttaccatgcctctttagaaaagaaagactcatatcggaaagccatcgccaggttctttccgaaaccgtatgacgacagcaggctgcttctggatgaaataacacgggcacaggatctttttctggacggcgtacctctgaggaaaaccatcgccaagaacttggccttgaaggagaacgtcttcatgatggtcgtctgcatcgagctgaagattcccctcttcctggtggggaagcccggcagctccaagtctctcgccaagaccatcgtggcagacgccatgcagggcccggctgcctactcagatctcttccgcagcctgaagcaggtccacctggtgtccttccagtgcagcccgcactccaccccacagggcatcatcagcaccttccggcagtgcgcccgctttcagcaggggaaggacctgcagcagtacgtctctgtggtggtgttagatgaggtggggctggcggaagactcacccaaaatgcccctgaagactctgcacccgctgctggaagacggatgcattgaagacgatcccgccccccacaaaaaggtcggcttcgtgggcatctccaactgggcccttgaccctgccaagatgaaccggggcatttttgtgtcacgtggcagccccaacgagacagagctcatagagagcgccaagggcatctgctcctcagacatcctcgtccaggaccgagtccaagggtactttgcgtcctttgccaaagcctacgaaacggtgtgtaagcgccaggacaaggaattcttcgggcttcgtgactactacagcctcatcaaaatggtctttgctgcagcaaaggcttcaaatagaaagccttccccgcaagacattgcacaggctgtccttaggaacttcagtggcaaggatgacatccaagctttggacatctttctggccaatttgcccgaggccaagtgctcagaggaagtcagccccatgcagctgatcaaacagaacatctttgggccttctcagaaggtgccgggtggagagcaggaagatgctgagtcccgctacttactcgtgctgaccaaaaactacgtggcactgcagatcctgcagcagacattcttcgagggggaccagcagccggagattatttttggttctggtttccccaaggaccaagagtacacccagctctgcagaaacatcaatcgtgtgaagatctgcatggaaacaggcaagatggtgttgcttctcaacctgcagaacctctacgagagcctctacgacgcactcaaccagtactacgtccacctcggcggccagaagtacgtggacctcggtctggggacccaccgcgtcaaatgtcgggttcaccccaacttccgcctgattgtcattgaagagaaagacgtcgtgtacaaacactttcccatccccctcattaaccggctggagaagcactatctggatatcaacacggtgctggagaaatggcagaagagcatcgtggaggagctctgtgcgtgggtggagaagttcatcaatgtcaaagcacatcatttccagaagaggcacaaatacagcccctctgacgtcttcatcggctaccactcggacgcctgcgcgtctgtggtgctgcaggtcatagagaggcagggtccccgggccttgacggaggaacttcaccagaaggtgtctgaggaggccaaatcgatcctgctgaactgcgctacgcccgatgccgtggtccggctgagcgcctactcgctgggcgggttcgcagcggagtggctgtcgcaggagtactttcacagacagaggcacaactcctttgcagatttccttcaggcacacctgcacacggcagacctggagcgccacgccatcttcacagagatcaccactttctccaggctgctaacaagtcacgactgtgaaattttagaatcagaggtcacaggcagggctccgaaacccacactcctgtggctgcagcagtttgacaccgagtactcattcctcaaagaagtccgaaactgtttaacgaatacagccaaatgtaaaatcctcatttttcagacagattttgaagatggaatccgtagcgcccagctcattgcctcagctaagtattctgttataaatgaaatcaacaaaatacgagaaaatgaggaccgtatcttcgtctatttcatcacaaaactgtcccgggtgggaagaggaacagcctatgtgggcttccacggagggctgtggcagtctgtccacatcgatgacctccggagatccaccctcatggtttctgatgtgaccaggctgcagcatgtcaccatcagccagctgttcgcgcccggagacttgcctgagctgggcttggaacaccgggcggaagacggccatgaggaggcgatggagacggaggccagcacatcaggggaggtggcagaggtggcagaggaggccatggaaacagaaagttctgagaaggtgggaaaggaaacctctgaactcggaggcagtgatgtgtcgatcctggacaccaccaggctgctgagaagctgtgtgcagagcgccgtgggcatgctcagagaccagaacgagagctgcacgcgcaatatgcggagggtggtgctcctcctgggcctcttgaatgaggatgacgcgtgccacgcctctttcttgcgggtatccaagatgcgcctcagtgtctttttaaagaagcaagaagagagccagtttcaccctctggagtggttggcaagggaagcctgcaaccaggacgctctccaggaggcgggcacattcaggcacaccctctggaagcgggtccaaggtgctgtcacccctctgctggcgagcatgatatcattcatcgacagagacggcaacctagagttactgaccaggccagatactccgccctgggcaagagatctttggatgtttattttcagtgacacgatgcttctgaacattcctcttgtgatgaataatgaaagacataaaggtgagatggcctacatcgtggtgcagaaccacatgaacctttccgagaacgcttccaacaacgtccctttcagctggaaaatcaaggactatctggaggagctgtgggtccaggctcagtacatcacagacgcagaaggactgcccaagaagttcgtggacatctttcagcagactcctctgggcaggtttcttgcccagctccatggagagccgcagcaggaacttcttcagtgttacttgaaggatttcattctcttgaccatgcgtgtgtcaacggaggaggaattaaagtttctgcagatggctctgtggtcctgcactaggaaactgaaagcggcgtcagaagcgcccgaggaagaggtttccttaccgtgggtgcaccttgcctaccagcgtttcagaagccgtctgcagaacttttccagaatcctgaccatctaccctcaggttctccacagcctgatggaagcccgttggaaccatgagctggctggatgtgagatgaccctggacgcatttgccgcaatggcctgcacggagatgctgacaagaaacaccctgaagcccagtccccaggcgtggctacagttggtgaagaatctttccatgccgctggagctcatctgctccgatgagcacatgcaaggcagcgggagcctggcccaggctgtcatcagggaagtcagagcccagtggagtcggattttctccaccgcactcttcgtggagcacgtgctcctaggaaccgagagccgcgtccccgagttacaggggctggtgaccgagcacgtcttcttactagacaagtgtcttcgagagaactctgacgtgaagacgcacgggccttttgaggccgtgatgcgcactctctgtgaatgcaaggagacagccagcaagaccctcagcaggtttgggattcagccgtgctccatctgcctgggagatgcaaaggaccccgtctgtctgccctgcgaccacgtgcactgcctgcgctgcctcagggcctggtttgcctcagagcagatgatatgcccctactgtttaactgccttgccagacgaattctctccagctgtttcccaagcgcacagggaagccattgaaaagcatgcccgcttccggcagatgtgcaacagtttcttcgtagacctggtgtccaccatttgcttcaaggacaacgctccgcctgagaaggaagtgattgagagcctgctctctctcctcttcgtccaaaaggggcgcttaagagatgctgcccagagacactgtgaacacacaaaatctctctctccattcaatgatgttgtggataagactcctgtcatccgctcagtgatactgaaactgcttttgaagtacagctttcatgatgtaaaagattatattcaggaatatttgaccctgttaaaaaagaaagcattcataactgaagataaaactgaactgtacatgctcttcatcaactgcctggaggattcaatacttgagaagaccagtgcttactccagaaatgatgaactgaaccacctagaagaggaaggtcgtttccttaaggcatattctccagcaagccggggccgagagcctgccaacgaggcctcggttgaatacctgcaagaggtggcccggatccgcctctgcctcgacagagctgcagatttcctctcggagcctgagggaggcccagagatggccaaggagaagcagtgctacctgcagcaagtcaagcagttctgtatccgggtggagaacgactggcaccgggtgtacctggtgcggaagctcagcagccagcgggggatggagttcgtgcagggcctctccaagcccggccgcccgcaccagtgggtgtttcccaaggacgttgtcaagcagcaggggctgcggcaggaccacccaggccagatggataggtacctggtgtacggcgatgaatacaaggctctccgtgatgctgtggccaaagctgtcctcgagtgcaagccactgggcattaagactgctctgaaggcctgcaagaccccccaaagccagcagtcagcctacttcctgttaacactgtttagagaggtggctattttgtacagatcccacaatgcaagcctccaccccacgccagagcaatgtgaagctgtgagcaaattcattggcgaatgcaagatcctttcacctcctgatatcagccgttttgcaacatcgctcgtggacaattctgtgccattgttgagggcggggcctagtgacagcaaccttgatggaacggtgacagaaatggccattcatgctgcagccgtccttctgtgtggacagaatgaactcttggagcccctaaagaatctggccttctccccagccaccatggcgcatgcttttcttccaaccatgcctgaagacttgctggctcaagctcggaggtggaagggtctggagcgagtccactggtacacttgtcccaacggccatccttgctccgtgggagagtgtggcaggccgatggaacagagcatctgcattgactgccatgcgccgattggaggcattgaccacaaacctcgggacggctttcatctggtcaaagacaaggcagacagaacgcagaccggccacgtgctgggcaacccgcagcggagagacgtggtgacatgtgaccgagggctgcccccagtggtcttcctccttatccggctactcactcacttggctctgcttctgggagcgtcccagagttcccaggctctgataaacatcattaagcctccagtgagggatccaaaaggctttctgcagcagcacatcctgaaggacctggagcagttggccaagatgctgggacacagtgccgacgagaccatcggcgtggtccacctcgtcctgcgcaggcttctccaagagcagcaccagctctctagcagaaggcttttaaattttgacacagaattgtcaactaaagaaatgaggaacaactgggaaaaggaaatcgcagctgtgatttctcctgaactggagcatctagataaaacccttcccaccatgaataatctcatcagccaagataagcgtatcagctctaaccctgtggccaaaataatatatggtgacccagtgaccttcctgccccacctgccccggaaaagtgtggtccattgctctaagatttggagctgcaggaaaagaattacagttgagtacctccagcacattgtggaacagaaaaatggcaaagaaagagtgcccatcctctggcatttcctgcagaaggaagcagagctgaggctggtaaagttcctgcctgagattttggccttgcaaagggatctagtgaagcagttccagaacgtccagcaagttgaatacagctccatcagaggcttcctcagcaagcacagctcagatgggttgaggcagctgcttcacaacaggatcacagtctttctgtccacatggaacaaactgaggagatcgcttgagacgaacggtgagatcaacctacccaaagactactgcagcactgacttggatctggacactgagtttgagatcctcttgccacgccgacggggcctgggcctctgtgctaccgctctcgtcagctacttgattcgcctacacaatgaaattgtctacgccgtggaaaaactctccaaggaaaacaacagctattccgtggatgccgccgaggtcactgaactgcatgtcatcagttatgaagtggagcgggacctgactccactgattctctccaactgccagtaccaggtggaggagggcagagagaccgtgcaggagttcgatctggagaagattcagcggcagatcgtcagccgcttcctccagggcaagccccggctgagcctcaagggaatacccactctggtgtacagacacgactggaactatgaacatctctttatggacatcaagaacaaaatggcacaggactccctccccagctcggtcattagtgccatcagtggacagctgcagtcctacagcgatgcctgtgaagtgctgtctgtcgtagaagtcactctggggtttctgagcacagctggtggggatccaaacatgcagctgaatgtgtatactcaagacatcctgcaaatgggtgatcagacgattcacgtgttaaaggccttaaacagatgccagttaaaacacaccattgccctctggcagttcctgtctgctcataagtctgaacagctgctgcggctgcacaaagagccatttggggaaatcagttcaaggtacaaagcggatctgagcccggaaaatgctaagctcctcagcacattcctaaatcagactggcctagacgccttcctgctagagctgcacgaaatgataatcttgaaactaaagaacccccaaacccaaaccgaggagcgcttccgccctcagtggagcctgagagacactctcgtaagttacatgcaaactaaagaaagtgaaattcttcctgaaatggcatctcagttcccagaagagatactgctcgccagctgtgtctcagtgtggaaaacagctgctgtgctgaaatggaatcgagaaatgagatagaattatttcctcagctatctttggatgactttggagagaagactcctctctcctcgtctgcggcgtggacttgatcatggactggtgcctttgcattcagaaggagagctgtcagcgtagcaccgaattcaagaccaaggcgtgctacctgagctgacagctttttgaaagccgagctgtttctgaaccatgtacatacatgttctgaaactttctcatcattttatgagtactgttcattgagagatgacaatgaagattagatgaaattggaaataaaccaacattgtttacattccaggagacttgtagctcagccacacacgcagtaatgacctgtgcccgttcgcctctggcactgcccacccctctttttttttttcttctaattctgtactcacaaaagagaatctcattttcttctttcttccattcccttaaattctgagtactgtacatatatttctgggttcccacgatgatgtgaaaaactaccagactgttttttgtcttctcacaaagacaagaaaaatcagggcattttgtgagtgccttaagatcaaactaacaagatctgaccctctcccctcacagtgagccactgccccacttcagagggtaagagccaaaagcctcattgtgaaaggcactggacttggaccagggacaccatcagggccttggttttctcacgcataaaatggagagtggattaatcgccaaagattcttctgatctgacattttgaaattgtgagagaaactagatgactgtaaacttggtcacaggcctggttctggcagttctttgcggacttttttctagcattatgccaaataaacatgcagtctcagtgtgctctcgcatgtatgaatatctagtcctttctgtggttctcagccaagacataaaaactaggactcagagcacatacaaaaccagttatgtttcggaaagagggaaaagagtccccgagcccggatcttgtgctgcttttctcactgacgtgttgccttttttctttacaaaatctgctttgatacttaggacctctctggactaatttctcttcctagacagctcagcacagctattgatatgttagaggcagtatccttaatattcattctaaatgagttaacgacttaacttgaaattgggcctaaggagtgagaactacaaaaatacaaaatgcttgtccaggactcagccatgcacaccttgagcagcgccggcaggaggcacggaaggaactgtgctccgttctcctcactgtcatggtgccaccagtgtctgatgaagggcagagtgacccagactgcaggcagtaactgacttcacacagtccctggcatttagtcatctgtgattgttttatcactctggactgtgcagagccacctgccaccgagatctgcattccgactgcctatgaacgggtgtgggggccgggggctggcttgctgaagtcttcaacttgcactcggagctcctttgatacctcagagctggctgtcaggtggcagctcacacccagactcactggccacacctcagcagggggggagtcgagtgtcagtctctttctgtgaaggctttttttttcctttggcctgggaatttttcccatttttatgaaggggttttaaattgtttcattttgtgtgctgtgcttcaaagccttaactgtcaaatcttgcattatcttgtttgtacagaaatatactggcctagcagaggcaaaaaaaaaaaaaatgaattttattttacttgtcacacctgtcttaataaactggagttttgctgctaaagaactcttctctctgggggcagagcttctatttatggcacatagacatcagctaggcttttgggaatcgtttgtgttctttgtggaaatgtcctttagaagcacccatgaagtagtgtgttcagactgtgcacacagaaaacaggctctgccttcacatgtgagacggtggacttttcctctggacaaaatgacagcatcctggcgactccacagtggagctgagcgccactccctgtagccgatctgggactgaaacgcttacacctctgcctcagaaggagtcccccatgccctgcctgaaatgacttcactggacacagcggggctgcagctaacggggtacaggtaggagctaactaacttcacccctgagtccacttgcggggtaagagataaacagtaacccttccaggagcccactgacgttggagtgctaaaaatgccccttcagggggaaaactgcattttctcttccaaaaaggaaaggttcttccaggcgagaaacctgtggtctagaaccacagcaagaagaggaggcatgctggcctgcaccggaagactcactttgtctgccctgcgccagcctcacctcaccctgcagttcccgtttccgccatggatgcctcatcaccaaccctgaccttccccctcccaaccctttattcatcctcactcccactcatacccgcctccctggacagttccctgctgcagagttctttctgctttcagccctaccttggtggtgatttacctgaaaatcttcacaactgatcattatctccttctctttgagacctgactgaaaaaattaggtgtgcacacctgtaatcccagctacctgggaggctgaggtatgaggattgcttgagcctgggagtttgaggctgcagtgagctatgattgcaccactgcactccaacctgggtgacagagtgagaccctgtctcaaaaaaaaataaaataacataaggaccttaaaaaaaaaaaaaaaaaaa

SEQ ID NO: 11 - DNA, 2770 bp, Homo sapiens
ctccttggcggtgcctggagcccgggcgcaccccaccgctcccgggacctgttgggggctggcccgaaccgtcgtcgaagggagccgctcggccacccccgacgttcctcgccccgcccgacgttccctcaagtggccgaaccagccggacgagccaaactcgccgggcctcccggcggcagcaggtggccccgtccttccagggagggccctgcgccccgcggcgctccggagccctctcggccgcccccgccaggcgggatggaggcggatggggacggagaggagctggcccggctgcgctcagtcttcgccgcctgcgacgcgaaccgctcggggcgcctggagcgcgaggagttccgggcactgtgcacggagctgcgggtgcggccggccgacgccgaggcagtattccagcggctggacgccgaccgtgacggcgccatcaccttccaggagttcgcgcgtggcttcctcgggtccctccgcggggggcggcgccgggactggggtcctctggatcccgcgcccgccgtgtctgaggcggggccggagacacacgacagcgaggaggacgaaggcgacgaggacgcggcggcggcgctggccacctcgtgcggcccggcgagtcccggccgggcttggcaggatttccaggcgcgacttggggacgaagccaagttcattcccagagaagagcaagttagtaccttgtaccaaaacatcaaccttgtggagccaagattaattcagccatatgaacatgttataaagaacttcatccgtgagatcagacttcaaagcacagaaatggaaaatttggccattgcggtgaagagagcccaggacaaggcagctatgcagttgagtgagttggaagaggaaatggatcagaggattcaggctgcagaacataagacacggaaagacgaaaaacgcaaagctgaggaagccctcagtgacctcagacgtcagtatgaaactgaagtaggagatctgcaggtgaccattaaaaagctaagaaagctcgaagaacaatcaaaacgcgtaagtcaaaaggaagatgtggctgcattgaaaaaacaaatttatgatttatcaatggaaaaccagaaagttaagaaagaccttttagaagcacagacaaacatagcctttcttcagagtgagttagatgctttgaaaagtgattatgctgatcagagtctgaatactgaaagggatctggaaataatccgagcatacacagaagatcgaaatagtcttgagaggcaaattgaaatactccaaacagctaaccggaagctacatgacagtaatgatggccttagaagtgcccttgaaaacagttatagcaagttcaacagatctttgcatataaataatatctcaccagggaatacaatttctagaagcagtcccaaattcattggtcattcccctcaacctctaggctatgacaggtcatcccgctcttcctatgtggatgaggactgtgactccctggccctctgtgatcctctgcagaggacaaattgtgaagttgacagcctgcctgaaagctgcttcgacagcggcttgtctaccttgagagatcccaatgagtatgactcagaagtggaatacaagcaccagaggggatttcagaggtcacacggggtgcaggagagctttggaggtgatgcttcagacacagatgttcctgacataagggatgaagagacatttggtttagaagatgtggcttccgtcttagactggaagccccaagggtctgttagtgaaggcagcattgttagttcatcaagaaagcccatctcagcactctcgccccagacagacctggtagatgacaacgctaaatcttttagctcacagaaggcttacaagattgtacttgctggggacgctgcagtggggaagtctagtttcctcatgagactttgcaagaatgaatttcgagaaaatataagcgccaccctgggagttgatttccaaatgaaaaccctcattgtggatggagaacgaacagttctgcagctctgggatacagctggtcaggagagattcagaagtattgccaagtcttacttcagaaaggcagatggtgttttgctgctgtatgatgttacatgtgagaaaagctttcttaacatacgagaatgggtagatatgattgaggatgcagcccatgagactgttcccattatgctggtaggaaacaaggctgacattcgtgacactgctgctacagagggacaaaaatgtgtcccagggcactttggagagaaactggccatgacgtatggggcattattctgtgaaacaagtgccaaagatggttctaacatagtggaggctgttctgcaccttgctcgagaagtgaaaaagagaactgacaaggatgacagcagatccattaccaatctaaccgggaccaattccaaaaagtcaccacagatgaagaattgttgcaatggctaaatcccaaacatccttggcctgtgaagtcttcatttccagaatactgaatttgtgtgacttatttggctcttaacagagtggcacatcctactgacactgtcctatggagagttacagtgcaggaaacctgaacccagctctcaggtccctctggaactttggctcttctttgttttgtctcagtgagtgatttgggccctctggctaaatagactagtcatgtccttacaggtcttaaaagataacatgtaaatgtttttaaaatggtaaaaaaaaaaaaaaaaaa

SEQ ID NO: 12 - DNA, 7037 bp, Homo sapiens
gctgcgtggagcggcggagccggagggaagcaaaggaccgtctgcgctgctgtccccgccccgcgcgctctgcgcccctcgtccctggcggtcgctccgaagctcagccctcttgcctgccccggagctgtcccgggctagccgagaagagagcggccggcaagtttgggcgcgcgcaggcggcgggccgcgggcactgggcgcctcgctggggcggggggaggtggctaccgctcccggcttggcgtcccgcgcgcacttcggcgatggcttttccgccgcggcgacggctgcgcctcggtccccgcggcctcccgcttcttctctcgggactcctgctacctctgtgccgcgccttcaacctagacgtggacagtcctgccgagtactctggccccgagggaagttacttcggcttcgccgtggatttcttcgtgcccagcgcgtcttcccggatgtttcttctcgtgggagctcccaaagcaaacaccacccagcctgggattgtggaaggagggcaggtcctcaaatgtgactggtcttctacccgccggtgccagccaattgaatttgatgcaacaggcaatagagattatgccaaggatgatccattggaatttaagtcccatcagtggtttggagcatctgtgaggtcgaaacaggataaaattttggcctgtgccccattgtaccattggagaactgagatgaaacaggagcgagagcctgttggaacatgctttcttcaagatggaacaaagactgttgagtatgctccatgtagatcacaagatattgatgctgatggacagggattttgtcaaggaggattcagcattgattttactaaagctgacagagtacttcttggtggtcctggtagcttttattggcaaggtcagcttatttcggatcaagtggcagaaatcgtatctaaatacgaccccaatgtttacagcatcaagtataataaccaattagcaactcggactgcacaagctatttttgatgacagctatttgggttattctgtggctgtcggagatttcaatggtgatggcatagatgactttgtttcaggagttccaagagcagcaaggactttgggaatggtttatatttatgatgggaagaacatgtcctccttatacaattttactggcgagcagatggctgcatatttcggattttctgtagctgccactgacattaatggagatgattatgcagatgtgtttattggagcacctctcttcatggatcgtggctctgatggcaaactccaagaggtggggcaggtctcagtgtctctacagagagcttcaggagacttccagacgacaaagctgaatggatttgaggtctttgcacggtttggcagtgccatagctcctttgggagatctggaccaggatggtttcaatgatattgcaattgctgctccatatgggggtgaagataaaaaaggaattgtttatatcttcaatggaagatcaacaggcttgaacgcagtcccatctcaaatccttgaagggcagtgggctgctcgaagcatgccaccaagctttggctattcaatgaaaggagccacagatatagacaaaaatggatatccagacttaattgtaggagcttttggtgtagatcgagctatcttatacagggccagaccagttatcactgtaaatgctggtcttgaagtgtaccctagcattttaaatcaagacaataaaacctgctcactgcctggaacagctctcaaagtttcctgttttaatgttaggttctgcttaaaggcagatggcaaaggagtacttcccaggaaacttaatttccaggtggaacttcttttggataaactcaagcaaaagggagcaattcgacgagcactgtttctctacagcaggtccccaagtcactccaagaacatgactatttcaagggggggactgatgcagtgtgaggaattgatagcgtatctgcgggatgaatctgaatttagagacaaactcactccaattactatttttatggaatatcggttggattatagaacagctgctgatacaacaggcttgcaacccattcttaaccagttcacgcctgctaacattagtcgacaggctcacattctacttgactgtggtgaagacaatgtctgtaaacccaagctggaagtttctgtagatagtgatcaaaagaagatctatattggggatgacaaccctctgacattgattgttaaggctcagaatcaaggagaaggtgcctacgaagctgagctcatcgtttccattccactgcaggctgatttcatcggggttgtccgaaacaatgaagccttagcaagactttcctgtgcatttaagacagaaaaccaaactcgccaggtggtatgtgaccttggaaacccaatgaaggctggaactcaactcttagctggtcttcgtttcagtgtgcaccagcagtcagagatggatacttctgtgaaatttgacttacaaatccaaagctcaaatctatttgacaaagtaagcccagttgtatctcacaaagttgatcttgctgttttagctgcagttgagataagaggagtctcgagtcctgatcatatctttcttccgattccaaactgggagcacaaggagaaccctgagactgaagaagatgttgggccagttgttcagcacatctatgagctgagaaacaatggtccaagttcattcagcaaggcaatgctccatcttcagtggccttacaaatataataataacactctgttgtatatccttcattatgatattgatggaccaatgaactgcacttcagatatggagatcaaccctttgagaattaagatctcatctttgcaaacaactgaaaagaatgacacggttgccgggcaaggtgagcgggaccatctcatcactaagcgggatcttgccctcagtgaaggagatattcacactttgggttgtggagttgctcagtgcttgaagattgtctgccaagttgggagattagacagaggaaagagtgcaatcttgtacgtaaagtcattactgtggactgagacttttatgaataaagaaaatcagaatcattcctattctctgaagtcgtctgcttcatttaatgtcatagagtttccttataagaatcttccaattgaggatatcaccaactccacattggttaccactaatgtcacctggggcattcagccagcgcccatgcctgtgcctgtgtgggtgatcattttagcagttctagcaggattgttgctactggctgttttggtatttgtaatgtacaggatgggcttttttaaacgggtccggccacctcaagaagaacaagaaagggagcagcttcaacctcatgaaaatggtgaaggaaactcagaaacttaactgcagtttttaagttatgctacatcttgacccactagaattagcaactttattatagatttaaactttcttcatgaggagtaaaaatccaaggctttactgctgatagtgctaattggcattaaccacaaaatgagaattatatttgtcaaccttctccttataaataagttcagacatacatttaataacatagggtgacttgtgtttttaggtatttaaataataaaatttcaagggatagtttttattcaatgtatataagacaggtagtgcctgatttactactttatataaaatagtacctccttcagttactgtttctgatttaatgtacggaactttatttgttgttgttgttgttgttgttgttgttgttttaaagcagtccaaatttggaccttagcaatcatgtcttttgtataggtacttaatgttaatacatattacactacagtttacttttcagaatactaaagactttataactgcatgaacttggatttttttaatcactcatatggtagaattttataaacacatacatgataccatccaaattcttgcttttaataacaaaggtacaatattttgttttagtatgaaaatctggtagatcctattacacttctgtttatattaaatccacaatattttattacatttttaacttgtataaattttaggtcaaatccttcaagccaacctatactaaaaattagttccataatcacaaatggctcttttgtgtaattgtttaatttcacctgaatatcataatgcttaaagccatatggagttggaaattatttccaaagcatatttattccattgttttagtctggctatttacagtataaaaaaagcatttttattaaaatactgtgtagttctttgagatagttgcttatgcatatagtaagtattacattcttagagtagagcagagtttttagttagtattaatttattttcctccattcatgtacttttccttatatttccaaaactgttactgagaatgggtcaagatcagtgagaaatctttacagttgacaggaacctggaccccttaccccaactttatgagtaatgcttggaataaaaactcttaaggcaactcactgatttacttctagcaatagcatgatgttacaggaatattacctctgtttaagcaaggtaatgtgtaaaatcagtctcggctgtcagaataacttctaaaaggtatttttataagcagttcaagttactgaaaaccttttaaacctttctgaagttcgttagtataaattacttttctaggattattaataaaagccacataggtggcaagttgtagttttatatggctctgtagagtggtgaaccttctagaggaatatatgatttattcacagttcctcaaggcctggggatgatgatcagttatacctatttttgtgcaattacatcatgttgtacattagaaatggagagtttaatagctctttaactgctgtcctcattaggtaatgataaatatttcccttaaataattgactattttgctgtgttttaaaaatgattgaaatttatcttgccatatctcataatttcatgcacaagttgactgagctaatcttgagaatatattcgtaaaataggagcacatttagttgaggtatacaaggtaggactctagacaaaaccttctattttagctttagtgaatttcaaaagtaatgggtcttggagtatagatttttattagtagcttgaaagagcttaatcatatgcagtaagtatttttattaccaataaatttaaaattttttaagaaaaatatttttatcctagggccaagtgttgcctgccaccaatcagtaagttagtctataacaaattttaccctaacagttttaccacctagtaacagtcatttctgaaaatatgttggatagaaagtcactctttggcaaaagtgttagaatttgcttttgtgccatctattccttttatggcatctatcttgaaagtaatcttgtattggagattgaaagatgctgtaatttagaaattaacatgatatcttaaattacctttatgaaatatagttttgtataatagcatagattttccttcaaaaaatgaacatttatatatctacaaaaatatggagaagagtaatttgaaagcctactttctgaagaaaatggtgggatttttttttatcatgattaaatatcaaaaaattgccctatgaaaactttaaatctctaaaacatttgaaatactaccatatttgtgatttattgagaataaaaatccattttgaaatgtaaaatttttatgatctgattcagttttaagaaaacatgaatgaactagaagatattaaaaacatttgacattggtaagaaatattgatactgatattgatttttatataggtatttatttcagaattgatattttgagaaaaatacatgtgagtcattttttctgtttctcttttctcttaacgattatcactgtaattctgaatctgaaaggtaaaacaattagtcaaaatattattgccatcattctacctgtgttatgaaactacttattcatagttaattctcattaacacttacatttccataaagaaaactcaagtattaataaaagagactttactggcttaagagggctgtgaaagatttttgatagtgaatcatgaccctaagggagagatttgtgtgataaaagtattgtatataatagatcagcgatttttgtaaggcaaacagaatttgtaagttggcagatcttcctaagttgcaaaatgtaatgatgagcttggtggagaagaatgagtcgttcttggaatacctatgtgcagccactacccatctcaatgtcaccttgtttgcattcttggatagcttgtatatgtagtagtttgatgaataatttaaagaaaaacacctaaaatttgaaaaatgattgtaggatcaaaaaaggcagatgaaattacttaatactcagtgttttggagagtattccttttagtttgttggttggctggtttgaacgatagaaatatgcagcatgcaatatatgcttatatttcattttaatttctgatatataatgaacttcttgggagaggtactgaatctttgatgttttttgtcattgttctcaagtgcaatataacaatgtaaccaaatctagataatttcaaagttgtcattaatttagtaagcctaatataaacaaatatttgtattatttttgttagcaggaaagagtgattaagtgaggttatttacccctaaatggtccattctgcattgtatttcaggctggaaatgaattattctttaccagttttgaaacactttgaaatatcctaaggtaacttggaagctgtgtagtatatcaaattaatttgctacctaataacatagaaagtaaatatctttgtggtcacccacattgggtgagacagaaaatgaatctgttctaaaatttgtaatttgctaacttgatttgagttagtgaaaactggtacagtgttctgcttgatttacaacatgtaacttgtgactgtacaataaacataagcatatggtaccaaaaaaaaaaaaaaaa

SEQ ID NO: 13 - DNA, 2059 bp, Homo sapiens
ccgcaggcgctcggggttggagccagcgaccgtcggtagcagcatggctctcctctttctcctaccccttgtcatgcagggtgtgagcagggctgagatgggcaccgcggatctggggccgtcctcagtgcctacaccaactaatgttacaattgaatcctataacatgaaccctatcgtatattgggagtaccagatcatgccacaggtccctgtttttaccgtagaggtaaagaactatggtgttaagaattcagaatggattgatgcctgcatcaatatttctcatcattattgtaatatttctgatcatgttggtgatccatcaaattctctttgggtcagagttaaagccagggttggacaaaaagaatctgcctatgcaaagtcagaagaatttgctgtatgccgagatggaaaaattggaccacctaaactggatatcagaaaggaggagaagcaaatcatgattgacatatttcacccttcagtttttgtaaatggagacgagcaggaagtcgattatgatcccgaaactacctgttacattagggtgtacaatgtgtatgtgagaatgaacggaagtgagatccagtataaaatactcacgcagaaggaagatgattgtgacgagattcagtgccagttagcgattccagtatcctcactgaattctcagtactgtgtttcagcagaaggagtcttacatgtgtggggtgttacaactgaaaagtcaaaagaagtttgtattaccattttcaatagcagtataaaaggttctctttggattccagttgttgctgctttactactctttctagtgcttagcctggtattcatctgtttttatattaagaaaattaatccattgaaggaaaaaagcataatattacccaagtccttgatctctgtggtaagaagtgctactttagagacaaaacctgaatcaaaatatgtatcactcatcacgtcataccagccattttccttagaaaaggaggtggtctgtgaagagccgttgtctccagcaacagttccaggcatgcataccgaagacaatccaggaaaagtggaacatacagaagaactttctagtataacagaagtggtgactactgaagaaaatattcctgacgtggtcccgggcagccatctgactccaatagagagagagagttcttcacctttaagtagtaaccagtctgaacctggcagcatcgctttaaactcgtatcactccagaaattgttctgagagtgatcactccagaaatggttttgatactgattccagctgtctggaatcacatagctccttatctgactcagaatttcccccaaataataaaggtgaaataaaaacagaaggacaagagctcataaccgtaataaaagcccccacctcctttggttatgataaaccacatgtgctagtggatctacttgtggatgatagcggtaaagagtccttgattggttatagaccaacagaagattccaaagaattttcatgagatcagctaagttgcaccaactttgaagtctgattttcctggacagttttctgctttaatttcatgaaaagattatgatctcagaaattgtatcttagttggtatcaaccaaatggagtgacttagtgtacatgaaagcgtaaagaggatgtgtggcattttcacttttggcttgtaaagtacagacttttttttttttttaaacaaaaaaagcattgtaacttatgaacctttacatccagataggttaccagtaacggaacatatccagtactcctggttcctaggtgagcaggtgatgccccagggacctttgtagccacttcactttttttcttttctctgccttggtatagcatatgtgttttgtaagtttatgcatacagtaattttaagtaatttcagaagaaattctcgaagcttttcaaaattggacttaaaatctaattcaaactaatagaattaatggaatatgtaaatagaaacgtgtatattttttatgaaacattacagttagagatttttaaataaagaattttaaaactc

SEQ ID NO: 14 - DNA, 5491 bp, Homo sapiens
aggtcagactgcaagattgtttgttcagatgtaggcctaacaagggattgttcttttaaaatcttctttaaggcaaaattttctgttttatttctttacagattccagcaagattatggaagagcatagctacatacaaaaggagctagatttacaaaatggtagcttagaggaagactctgtggtgcattctgttgagaacgattcccaaaacatgatggagagcctcagcccaaagaaatactcttccagtctgagatttaaagccaatggagactattctggctcctatttaaccctctcacaacctgtgcctgcaaagagaagcccttctcctttgggaaccagtgtcagaagcagcccctccttagccaaaatccagggaagcaagcagttctcttatgatggaactgacaaaaatattcctatgaaacctccaactcctttactcaacactacatcctccctcagtggatatccacttggaagagcagactttgatcattatactggccgggacagtgaaagggccttgaggctctcagagaagcctccctattccaaatatagctcaaggcataaatcgcatgacaatgtctactctcttggagggctggaaggtcggaaggcatctggctcgctcctggccatgtggaatggaagttccctgagtgatgctggcccgcctcctatcagcagatcgggagccgcaagcatgccttcaagcccaaagcaagccaggaaaatgagcattcaggacagcctggcgcttcaacccaagttaactagacacaaggagcttgcatctgaaaacatcaatttgagaactaggaagtactccagcagcagcctgagtcacatgggagcctacagccgatcacttcccaggttgtacagagccacagagaaccagctgacacctctcagcttgcctccaagaaactctctgggcaattccaaacgaacaaaacttggggaaaaggatctacctcatagcgtaatagacaatgacaattaccttaatttttcttctttgagctcaggggctttaccctataaaacctctgcttctgaaggcaatccttatgtaagttctaccctcagtgtccctgccagtccacgagtggctcggaagatgcttctggcctccacctcctcctgtgcctctgatgactttgatcaggcttcatatgtggggacaaacccgagtcattcacttcttgctggagagtcagacagagtttttgcgaccaggaggaacttctcttgtggatctgtggaatttgatgaggcagatttggaaagcctcagacaggcctcaggaaccccccagcctgcccttcgggaacggaaaagcagtattagctccatttcaggacgtgatgacctgatggattatcaccggcggcagagggaggaaagactcagggagcaggaaatggagcgattggagagacagcgtctggagaccatcctcagtctctgtgctgaatacacaaagcctgacagtcgcttatctactgggaccaccgtggaagatgtgcagaaaatcaacaaggagcttgagaagctgcagctctctgatgaggagtctgtgtttgaggaagccctcatgagccctgacacaagatacaggtgccaccggaaagactccctccctgatgcagacttggcaagctgtgggagtctcagtcagagcagtgccagcttctttacccccaggagcaccaggaatgatgaactactcagtgacctcacccggactcctccaccaccatcctccacctttccgaaagcttccagcgagtcctcttatctaagtatcctaccaaagaccccagagggtataagtgaagaacagagatctcaggagttggctgcaatggaagaaacccggatagtcattctgaacaacctcgaggaacttaagcaaaaaatcaaagacataaatgatcagatggatgagtctttcagagagttggatatggaatgtgctcttttggatggagaacagaaatctgaaacaactgaacttatgaaggagaaggagattttggatcatctaaaccggaaaatagctgaactggaaaagaacattgttggtgaaaagaccaaggatgctgacctgttggatgttgaaagcaaacactttgaagacctggagttccagcagcttgaacatgagagccgtctagatgaagaaaaggagaacttgactcaacagctcctgcgtgaagttgctgaatatcaacggaacatcgtttctagaaaggaaaaaatttctgcattgaaaaagcaagccaatcacattgttcagcaggctcagagagagcaagatcattttgtgaaagaaaagaataatttaataatgatgttgcaaagagaaaaggagaatctttgtaatttggaaaagaaatactccagcctctctggggggaaagggtttcccgttaaccccaatactttaaaagagggctatatcagtgtaaatgagattaatgagccgtgtggcaattccacgaatctatccccttccactcagtttcctgctgatgctgatgctgttgccactgagcctgccacagctgtgctggcgagccagccacagagtaaagagcactttagaagtctggaagaaaggaaaaaacagcataaagaaggcctctatctgagtgatactttgcctcgaaagaaaaccacatcttccatctccccacatttcagcagtgctactatggggagaagcatcaccccaaaggcccatctgcccctaggacagagtaacagctgtggaagtgtgctccctccctcactggcagccatggccaaagactcagaatctcggaggatgctcagaggttataatcaccaacagatgagtgaaggacacaggcagaaatctgaattttataaccgcacagcatctgaatcaaatgtctacttgaatagtttccattatccagatcacagctacaaggaccaggcctttgatactctgagcctcgatagctctgatagcatggagaccagcatctctgcttgctcaccagacaacatctctagtgccagcacttcaaatattgctagaatagaagaaatggagagacttttgaagcaggctcatgcagaaaagacgcggctgctcgaatccagggaacgggaaatggaagccaaaaaacgagccctggaagaagaaaaacgacgccgggaaatcctggaaaaacgattacaggaagaaactagccagaggcagaagttaatagaaaaggaagtaaaaataagggagagacaaagggcacaggctcgtcctttgacacgctacctgcctgtccggaaggaagactttgatttgcggagccatgtagagactgctggccacaatattgacacctgttaccatgtatcaatcacagagaagacctgccgaggattcctcatcaaaatgggtgggaaaattaaaacgtggaaaaaacgttggtttgtttttgatcggaacaagcgaacattctcttattatgcagacaagcatgaaactaaattgaaaggagtaatatactttcaagccattgaagaagtctattatgatcacctcaagaatgctaataagagtcctaatccgttactcacctttagcgtcaagactcatgacagaatctattatatggtagccccatcgccagaagccatgcggatctggatggatgttatagttacgggggcagaaggttacactcacttcttgttgtagtgaactgaggcaacagtccacttcagggcagacggcaataatctcttacaagaatgaagccatattcaaccccagatgagaaaacccaacagatccatcccttgagctgtaaacactcagaactcctttcatatcaagacaagttatttgtaaaaaataaagaaggggttttaatacaaaccttcataataaatagcaaaataattgaagcttccatgagaaagaaaacactattttgataaattggatcacttataggaacatttctaataaactgtttttaatcagttgtcggatttggtgaaataaactaaacaggttacagaatatctgtatgtacttggaaatacagaataactttatcacccaaatcactggcattgacattattggtaatcaactggctttttttaaaaaaggtagcattttgttgacagttattttgtaaacataagcaaataagggcttggagggaaatacattttaggaggagttttgccttaattttttaagtactgcaccaaaaccaaagagctgacctgacttctgtggaacagtagtaactgcaagtgatgaactgcatttcgtattgttctgtatatttcaaaatggtattttgatgccatcaaatgcccaggaaattgactttgcagtgtcaccactggtgtaagctactatatatgtatatatatatgtagtaaaccactttttgtaaaagaagaaagagcaaaaagctgtgtgttttagaaaaaaaagccaggttacgcaacaggcattctgtcatgttgaacaattttaaataaagagaatatctggtgttaggagcttgttttgctgaagatttctccattcctggtgctgagaataaaggcaaccagtagccaatgtcctttagattgtctgatttctttttgttgtggagcacacctgctaactgctccctcaacataactatgaaatcatagctctgttttcaccaaagaacagaccaattaacatacttatttgcagaagtggtgtagttctacaaaacggcaaatgaagttcaacttaatattctctataatgtattattttattttattttttacaattagccttttttttagttaatttttgtcaaatgaaacgacttcaggcaagtctcttttataatggtttttcaagtgccatttattctagtttatcatgttttgcatgtttgaaagtatgaatgtgctctttcctaaaacatggcaaatgaatagatgtagagaataacaatattacttacaagatgaaatgattagattagaagtgtccctttattagactttgtcagcctgactgggtacaattcttttgttaatttgcagtgtggtttgtatacacgtatacgtgttatcaataataagattttgcaactggatgacacaagattttacttgaacagtgaaggacaaaaatcatgattgtggaagatatttttaaaatctgattttgcagcgatcacttttaaaccctgtagtgatgtaagactaaaatataattgctaagattttgttggttaatgtaaagatatgacttttctgcactgtactctcttcataggattgtaaaggtgttctaatccaattgcatgatgtagtaagcctcttaaatatgtgtgttaaatatattgagtttggattaaaatgttgacatgatttcacatttgaaaataaaatcatactcttattttgaagttaaaaaaaaaaaaaaaaa

SEQ ID NO: 15 - DNA, 6044 bp, Homo sapiens
gcgcgggagacagttcgctccgactgcccgagcgagggcgcttcgctcccagccaggacatggccgcacctctccgcatcaggagcgccggctcacggacttctcgcccaactccctgagcgctccctcgtttcgatctttagaaaaccccgctttctttctggggccgtgacgaggggcagggagcggcgagcaaggatgcgttgaggaccgcgagggcgcgcgtctcgggtgccgccgtgggtcccgacgcggaagccgagccgcctccgcctgcctcgacttccccacagcgcttccgccgccgcctgccgtgcttgatgtgcagaaagaagccggacaccatgatcctaacacaaattgaagccaaggaagcttgtgattggctacgggcaactggtttcccccagtatgcacagctttatgaagatttcctgttccccatcgatatttccttggtcaagagagagcatgattttttggacagagatgccattgaggctctatgcaggcgtctaaatactttaaacaaatgtgcggtgatgaagctagaaattagtcctcatcggaaacgaagtgacgattcagacgaggatgagccttgtgccatcagtggcaaatggactttccaaagggacagcaagaggtggtcccggcttgaagagtttgatgtcttttctccaaaacaagacctggtccctgggtccccagacgactcccacccgaaggacggccccagccccggaggcacgctgatggacctcagcgagcgccaggaggtgtcttccgtccgcagcctcagcagcactggcagcctccccagccacgcgccccccagcgaggatgctgccaccccccggactaactccgtcatcagcgtttgctcctccagcaacttggcaggcaatgacgactctttcggcagcctgccctctcccaaggaactgtccagcttcagcttcagcatgaaaggccacgaaaaaactgccaagtccaagacgcgcagtctgctgaaacggatggagagcctgaagctcaagagctcccatcacagcaagcacaaagcgccctcaaagctggggttgatcatcagcgggcccatcttgcaagaggggatggatgaggagaagctgaagcagctcaactgcgtggagatctccgccctcaatggcaaccgcatcaacgtccccatggtacgaaagaggagcgtttccaactccacgcagaccagcagcagcagcagccagtcggagaccagcagcgcggtcagcacgcccagccctgttacgaggacccggagcctcagtgcgtgcaacaagcgggtgggcatgtacttagagggcttcgatcctttcaatcagtcaacatttaacaacgtggtggagcagaactttaagaaccgcgagagctacccagaggacacggtgttctacatccctgaagatcacaagcctggcactttccccaaagctctcaccaatggcagtttctccccctcggggaataacggctctgtgaactggaggacgggaagcttccacggccctggccacatcagcctcaggagggaaaacagtagcgacagccccaaggaactgaagagacgcaattcttccagctccatgagcagccgcctgagcatctacgacaacgtgccgggctccatcctctactccagttcaggggacctggcggatctggagaacgaggacatcttccccgagctggacgacatcctctaccacgtgaaggggatgcagcggatagtcaatcagtggtcggagaagttttctgatgagggagattcggactcagccctggactcggtctctccctgcccgtcctctccaaaacagatacacctggatgtggacaacgaccgaaccacacccagcgacctggacagcacaggcaactccctgaatgaaccggaagagccctccgagatcccggaaagaagggattctggggttggggcttccctaaccaggtccaacaggcaccgactgagatggcacagtttccagagctcacatcggccaagcctcaactctgtatcactacagattaactgccagtctgtggcccagatgaacctgctgcagaaatactcactcctaaagctaacggccctgctggagaaatacacaccttctaacaagcatggttttagctgggccgtgcccaagttcatgaagaggatcaaggttccagactacaaggaccggagtgtgtttggggtcccactgacggtcaacgtgcagcgcacaggacaaccgttgcctcagagcatccagcaggccatgcgatacctccggaaccattgtttggatcaggttgggctcttcagaaaatcgggggtcaagtcccggattcaggctctgcgccagatgaatgaaggtgccatagactgtgtcaactacgaaggacagtctgcttatgacgtggcagacatgctgaagcagtattttcgagatcttcctgagccactaatgacgaacaaactctcggaaacctttctacagatctaccaatatgtgcccaaggaccagcgcctgcaggccatcaaggctgccatcatgctgctgcctgacgagaaccgggaggttctgcagaccctgctttatttcctgagcgatgtcacagcagccgtaaaagaaaaccagatgaccccaaccaacctggccgtgtgcttagcgccttccctcttccatctcaacaccctgaagagagagaattcctctcccagggtaatgcaaagaaaacaaagtttgggcaaaccagatcagaaagatttgaatgaaaacctagctgccactcaagggctggcccatatgatcgccgagtgcaagaagcttttccaggttcccgaggaaatgagccgatgtcgtaattcctataccgaacaagagctgaagcccctcactctggaagcactcgggcacctgggtaatgatgactcagctgactaccaacacttcctccaggactgtgtggatggcctgtttaaagaagtcaaagagaagtttaaaggctgggtcagctactccacttcggagcaggctgagctgtcctataagaaggtgagcgaaggaccccctctgaggctttggaggtcagtcattgaagtccctgctgtgccagaggaaatcttaaagcgcctacttaaagaacagcacctctgggatgtagacctgttggattcaaaagtgatcgaaattctggacagccaaactgaaatttaccagtatgtccaaaacagtatggcacctcatcctgctcgagactacgttgttttaagaacctggaggactaatttacccaaaggagcctgtgcccttttactaacctctgtggatcacgatcgcgcacctgtggtgggtgtgagggttaatgtgctcttgtccaggtatttgattgaaccctgtgggccaggaaaatccaaactcacctacatgtgcagagttgacttaaggggccacatgccagaatggtacacaaaatcttttggacatttgtgtgcagctgaagttgtaaagatccgggattccttcagtaaccagaacactgaaaccaaagacaccaaatctaggtgatcactgaagcaacgcaaccgcttccaccaccatggtgtttgtttctagaacttttgccagtccttgaagaatgggttctgtgtctaatcctgaaacaaagaaaactacaagctggagtgtaggaattgactatagcaatttgatacatttttaaagctgcttcctgtttgttgagggtctgtattcatagaccttgactggaatatgtaagactgtgcaaaaaaaaaaaaaaaatttatgtgtattcttattcagattgcttctgagaagcaaaactctttaaatacattatggaagataatgaagatacttcattctcttgtgatatcagtgtatgcgtacctgtgtcgctttatttgcagtgtgttgagggactggtgtatccactggaatagttggtactcttggatgtgttttctcaccaagatgagcaaagaaaggtttgcacagaggagtgtgaatgtgtgtttgttgctggctgaatggcaatagatgtctaaggtggattcagtgtctggcacactgagacacctccaagaaggagattgatgcatcaggttcagtttaacctggaatatctgactacccctgaatccacccagaaagggggcccaacacccttgtccatttatgggtattttttttcgaagttattaagcatattccttttccacgaacctcttctgtactttgattgtaataggttggctcttacacccattccaaatgcagtttatttttagacccgattgcaaatagtgatgtagttttaaccagtatggattagttcagggatgaactgctccctctagccttactggctctgatccacagggttttgttttgttttgttttgttttttgtttaagtcgagatataaaaactgaacacgataacacttactcttaaatcaagcatcaacactttttccctgttagaattctttgcatttttgtgtttgtaacagaaacgccttaagacactatgtttgggaatataggaaactatgtgtgtcccaaggaaatccctgtaaatttaactcacctacaaaaggctttttccccgcctttggttgttaacggcattcctgaaagccacatgtgtttattcattgggcttgttcttatcagcaaataggttttctggttttatgactttttgtcttattttatttttcctacatttctttttttttttttttcctttagaatgccctggaaatatatttaagtggtaatgaaaaatagtaatcatagtaaaacgcaacaagaagaaaaccaacccaaaccagtgaagttttttagaacctttagaagggtggtctttattcaggttttactgtaatggtaaggattgactcaagagacagtattagtaaatttattgtgtatggatcaaaagtgaataatgtatgaatgagagctgtaagaaggatttttattttgttataatttagttaccattttcagtgttatttcaaaggttctttgaagaattttggggcagggcatcagattagagttttaaaatttgagtattttggatatcagtgttcctcatgaagatatacatggatattcaattttgatggcttccagatttgtaagattgtatgttgtatataccattctattaagaaacatgtccactgtgctttcaaacatagataaagcatgataaagattattatttaagatatacttgtatttatacctcagatattcttttgggttttgtacctcaaggcttttttcttcttattgtaaatacactttacgtgaatacagtctaagtgaagaaaataaataaaaggaagaggtttataacttgctctatatctgtacagattataatcaataagtgcactattattaaatgtttaaagtaagggaaaagtctgggctgccttccttaatattgcatctcactcccacccttaaaaccacagattgcaaagcatagcattttagcatcaactacaatcaaaagagcgatttgctgaaggaaaaatcggactgcaaatcattccaaggccaaactgcaactgagccacccactcccaaacaggaaaccctggtgaaggttcaggaagcacggagattctctccaacaaaggtccagttaggaaacgacgctgagaggatgacgacaacgtgcaacagcagaaagatgcttgcaagcagagtcagggtcaccagtgaatgccacaaaagttctctttcccactgtttaatttgacaagagaagaatttgaaggatatgaacattttcaagaactctgctgaggtcacttagagcgccatcacaacttatttgtgtgactaattgcctagattgtaagctctttgagggcagggcttgtctcttacacatctttataatcccctgcagcggctttcagtattttgtacttgtaggcacctaataaatttattatttgctatactg

SEQ ID NO: 16 - DNA, 2775 bp, Homo sapiens
gcagtccagatgtcgtcagcaccagcgcctgggctggaggacagagaagccttttccgttgccggtgccggcctagcgtcctggaattacttcaatcaacaggagcgagaacccgagcagcgccatgagcaacactaccgtcgtccccagcactgcaggtccgggccccagcggcgggcccggtggcggaggtggtggtggcggcggaggcggcggcaccgaggtaatccaggtgactaatgtctccccgagcgctagctctgagcagatgcggactctcttcggtttcctaggcaagatcgacgaactgcgcctcttcccgccggatgattcgcctttgccagtctcatctcgtgtctgctttgttaagttccatgatccagactcagcagttgtggcacagcatctgacaaacactgtattcgttgacagagctttgatagtcgtaccatatgcagaaggagttattcctgatgaagctaaagctttgtctctgttggcaccagctaatgcagtggcaggtcttctgcctggtggtggactcctgcctactcctaacccacttacccagattggcgctgttccactggctgctttgggggctcctactcttgatcctgcccttgctgcacttgggcttcctggagcaaacttgaactctcagtctcttgctgcagatcagttgctgaagcttatgagtactgttgatcccaagttgaatcatgtagctgctggtctcgtttcaccaagtctgaaatcggatacctctagtaaagaaatagaggaagctatgaaaagagtacgagaagcacagtccctaatttctgctgctatagaaccagataagaaagaagaaaaaagaaggcattcaagatcaagatcacgttctaggaggaggaggactccctcatcttctagacacaggcggtcaagaagcagatcgagacggcggtcacattctaagtctaggagtcggcgacgatccaaaagcccaaggcggagaagatctcattccagagaaagaggtagaaggtcaaggagcacatcaaaaacaagagacaaaaagaaagaagacaaagaaaagaaacgttctaaaacaccaccaaaaagttacagcacagccagacgttctagaagtgcaagcagagagagacgacgacgaagaagcaggagtggcacaagatctcctaaaaagcctcggtctcctaaaagaaaattgtcccgctcaccatcccctaggagacataaaaaggagaagaagaaagataaagacaaagaaagaagtagggatgaaagagaacgatcaacaagcaagaagaagaagagtaaagataaggaaaaggaccgggaaagaaaatcagagagtgataaagatgtaaaacaggttacacgggattatgatgaagaggaacaggggtatgacagtgagaaagagaaaaaagaagagaagaaaccaatagaaacaggttcccctaaaacaaaggaatgttctgtggaaaagggaactggtgattcactaagagaatccaaagtgaatggggatgatcatcatgaagaagacatggatatgagtgactgaatattgcctctgagggagtccaactgtatacctgcatcagtgtcattcctttgtgtgatttcttaatgctgtatttgttcatctcaaacctagatgtatacagctctgagttataaatggttataaagctcctgttactcatattagttatttacatcaaaaagcttttagaaaatggtacgaggtaaccaattcttgtcatggtgaaatctgattgagtaaccaagcagttttactattctggtgctgcttcataacaaaaatgaaaagctgcatgcatctacagcaggcatggattgtttatgtcgtatgatatcctttattaagtaagttcacttatagtatttctataatttgattcattgccgtaatagagccatgtaggaaatgcactgattgcatgttattgtggcaagaatatcctaaatgtcattaaaatcctccaacatgatggatctacttatggtcttgtttgttgacatgacaaattaacattcttatagttacatctggaaatgagcatttgaaatagataatcctttaagccttgtggcaaaatttttgtggcttttgtttaactttgaaaggttattatgcactaaccttttttggtggctaattagggtttaaatacagaaacaagatttcaaataaaactgtctttggcagtgagtaaatagcatattttgaagtagagttgtatactttttcataagatgtttgggaatttttttcctgaagtaataatttattccacatctacatcagtgaaagctatctacctatcctgagtctatcttaaaggaaaaaaagaaaaaaaccttatctcttgcccttattttgaattttccactctttcattaatttgttttaagctccgtgttggaaaaaaggggtagtgcattttaaattgaccttcatacgcttttaaaataagacaaatctacttgataatgtacctttatttgatctcaagttgtataaaaccaataaatttgtgttactgcagtagtaatcttatgcacacggtgatttcatgttatatatgcaaagtaggcaactgttttcttagttacagaagtttcaagcttcacttttgtgcagtagaaacaaaagtaggctacagtctgtgccatgttgatgtacagtttctgaaattgttttacaagactttgataataaaacccttaaactta

SEQ ID NO: 17 - DNA, 1602 bp, Homo sapiens
aacaaatgttttaacccactgtcttcactaatattgtaactactgtcttacagattgacttgatgcacaacatcacaaaggcgatttttgagaactgatagtgcatcagccgacccaggtaatttaaaatattcttcatccagagatagaggtggttcttcctcttacggactgcaaccttcaaattcagctgtggtgtctcggcaaaggcacgatgataccagagtccacgctgacatacagaatgacgaaaaggagagatcgatgtcttattgtgatgagtctcgactgtcatatcttcttcggaggatcacccgggaaaacgaccgagaccgaagattggctactgtaaagcagttgaaagaatttattcagcaaccagaaaataagctggtactagttaaacaattggatatcttggctgctgtacatgatgtgcttaatgaaagtagcaaattgcttcaggagttgagacaggagggagcttgctgtctcggccttctttgtgcttctctgagctatgaggctgagaagatcttcaagtggatttttagcaaatttagctcatctgcaaaagatgaagttaaactcctctacttatgtgccacctacaaagcactagagactgtaggagaaaagaaagccttttcatctgtaatgcagcttgtaatgaccagcctgcagtcaattcttgaaaatgtggatacaccagaattgctttgcaaatgtgttaagtgcattcttttggtggctcgatgttaccctcatattttcagcactaattttagggtgagttcctcattccgctgttcagatcatggggtgagggggatggttgtgtgtgtgaggaactgaggaatcagatggaaaacagtgcctctgctcctttgaatataatcagtgatatttgaggttccagggttaaatgccgcatttttctttctgacgttcgtaccttaaaatatttgaagaaaataaactatttcattgttgtcagaaatgtagttcttttattttcctgcccctctcccctttctaagtttctagaatgtcaagtaggtagaacatagatgctccttttaggatcttttgctgtgaaatggtccacaggtggattgcagtaatatcttaaaatgattggccccctctctctttgtttccatcaaggatacagttggtatattagttggatggcatagagatcatactcagaaaccttcgctcacgcagcaggtatctggtaagtcttgcagcctataccagttatttaaatactgtcggggaggagcagtggtcccccagtgaccatctatcaataccatttctttaataatgcaagaaaactaattcagagaaatgttttattgtaaatgaacatgacttgttagctaaatatatattttcagaggaaattactagtaggtgggtagagtaagtacagacaggacttacccaagttatttgtagtttgtactggtaggaaagtatatggtaagaatatattgcagtggcaataccctgaagtggacaatggaagatccaagttatttgtcacattttattgtttttctggttatttttttaaaaaaaaaaaaaaaaaaa

SEQ ID NO: 18 - DNA, 3934 bp, Homo sapiens
ctcggctggctaagcctgcgccgggccgcctcgctcgctcccagctctgtcagtggcccgcggggcccgatcgctgcgcccgcggccagggccgaggcaggcctgacccggggccgggcagcccgcgcgactttcggaacatggcaacccgtgtgtgtctcatcccagaaagagaagactttaaccactgtgatgcctgagaatccagtgagtgtgacgtttctccagatacttcatgctgttcacctgtgtcctcgccgcaccactgccgcacacgactcctgaaccatgggggaaaacgaggatgagaagcaggcccaggcggggcaggtttttgagaactttgtccaggcatccacgtgcaaaggtaccctccaggccttcaacattctcacacgacacctggacctagaccctctggaccacagaaacttttattccaagctcaagtccaaggtgaccacctggaaagccaaagccctgtggtacaaattggataagcgtggttcccacaaagagtataagcgagggaagtcgtgcacgaacaccaagtgtctcatagttgggggaggaccctgtggcttgcgcactgccattgaacttgcctacctgggagccaaagtggtcgtggtggagaagagggactccttctcccggaacaacgtgctacacctctggcctttcaccatccatgaccttcggggcctgggagccaagaagttctatgggaagttctgtgctggctccatcgaccatatcagtattcgccaactacagctcatcctattcaaggtggccctgatgctgggagttgaaatccatgtgaatgtggagttcgtgaaggttctagagcctcctgaagatcaagaaaatcaaaaaattggctggcgggcagaatttctccctacagaccattctctgtcggagtttgagtttgacgtcatcattggtgccgatggccgcaggaacaccctggaagggttcagaagaaaagaattccgtgggaagctggcgattgccatcaccgccaacttcataaacagaaacagcacagcggaagccaaggtggaagagattagtggtgtggctttcatcttcaatcagaaattttttcaggaccttaaagaagaaacaggcatagatcttgagaacattgtttactacaaggactgcacccactattttgtaatgacagccaagaagcagagcctgctcgacaaaggtgtcatcattaacgactacatcgacacagagatgctgctgtgtgcggagaacgtgaaccaagacaacctgctatcctatgcccgggaagctgcagactttgccaccaactaccagctgccatccttagactttgccatgaaccactatgggcagcctgatgtggccatgtttgactttacctgcatgtatgcctcagagaacgcggccctggtgcgggagcggcaggcgcaccagctgctcgtggcccttgtgggtgacagcttgcttgagccattttggcccatgggtacaggctgtgcccgtggcttcctggcagcctttgacacggcatggatggtgaagagctggaaccagggcacccctcccctggagctgctggctgaaagggaaagtctctaccggctgttacctcagacaaccccggagaacatcaacaagaactttgagcagtacacgttggacccagggacacggtacccaaacctcaactcacactgtgtcaggccccatcaggtgaagcatttgtatatcactaaggagctggagcactaccctctcgagagactgggctcggtgaggagatctgtcaacctctccaggaaggagtcagatatccggcccagcaagctcctgacctggtgccagcagcagacagagggctaccagcatgtcaacgtcaccgacctgaccacatcctggcgcagtgggttggccctgtgtgccatcatccaccgcttccggcctgagctcatcaactttgactctttgaatgaagatgatgctgtggagaacaaccagctcgcatttgatgtggccgagcgagagtttgggatccctccagtgaccacgggcaaagagatggcatctgcccaggagcctgacaagctcagcatggtcatgtacctctccaagttctacgagctcttccggggcaccccactgaggcccgtggattcttggcgcaaaaactatggagaaaatgctgacctcagcttggccaaatcatccatttctaataactatctcaacctcacatttccaaggaagaggactccacgggtggatggtcaaaccggagagaatgacatgaacaaacggagacggaagggcttcaccaacctggacgagccttcaaacttttccagccgtagcttgggctccaatcaagagtgtgggagcagtaaggaaggtggaaatcagaacaaagtcaagtccatggcgaatcagctgctggccaagtttgaggagagcactcggaacccctcactcatgaagcaggaacgccgtgtctcagggataggtaagccggtcctgtgctcttcctccggccctcctgttcactcttgctgccccaagccggaggaggccacacccagcccatcacctcctctgaaaaggcagttcccctctgtggtcgtgacggggcacgtgctcagagagctcaagcaagtgtctgctggcagtgagtgcctgagcagaccttggagagccagagccaagtctgacctacagctgggtgggacagaaaatttcgctaccctgccttctacccgcccgagggcgcaggctctttccggggtgctgtggcggctgcagcaagtggaggaaaagattctccagaagagggctcagaacttggccaacagggaatttcacacaaagaacattaaggagaaggcggctcaccttgcctccatgtttggacacggggatttcccgcagaataaactactctctaaaggcctgtctcatactcatcctccatctcctccctctcgccttccgtctcctgatccagctgcttcttcctctccatcaactgttgactctgcttctcctgccagaaaggaaaagaagtcaccttcagggttccattttcatcccagccatttgagaacagtgcatcctcagctgacggtagggaaagtgtccagcggaataggggctgcagctgaagtcctggtcaatctgtacatgaatgatcacagacctaaggcccaggccacctctccagacctggaatctatgcgaaagtcatttccccttaacctgggaggcagcgacacgtgttacttctgtaagaaacgtgtgtacgtgatggaacggctgagcgccgagggccacttcttccaccgggagtgtttccgctgcagcatctgtgccaccaccttgcgcctggccgcctacacctttgactgcgatgaaggcaaattttactgcaagcctcacttcattcactgtaaaaccaatagcaaacaacggaagagacgggcagagttgaagcaacaaagagaggaggaggcaacatggcaagagcaggaagcccctcggagagacactcccaccgaaagttcttgcgcagtggccgccattggcaccctggaaggcagccccccagttcatttcagccttccagtgctacacccacttcttggctgacacacttctgctctaagagtctccctccctttatagaatgtcaaccaaagagtgccctcctcccctctcagcctcctctttagctagcctccccatctcatcacaacgcatgtctgtgacctttggtaatcatttacagtgccacacggaaccctgtattttgcacacagcaaaacaaacaatgtttagctttatttatggtatttgatgctgtaaatggaaataaatattgttctttataaaaaaaaaaaaaagaaaaaaaaaaaaaaaa

SEQ ID NO: 19 - DNA, 1570 bp, Homo sapiens
cttaaaaagttgcagaaagaagaaaggaaagggaaagaaaagtgttcagaaatctttatatggggaaagagacattgcttctaagaagcccctcctcagtcctattcccgagctgcctgaagtccctgagatgacaccttccattccgagcatccgaagactgggttcaggttatttcagttcaaatggcaaactggaagaagtgaagactcctaaaaatccagtgaaaagaaaggatcttttgcgtcatgacccagatttgcatatgcatcaaggctatgataaatatgatgtctctgaattctgctctgatataaaaagttcctcatcgcttggcaatgctacttctgatgaagatccaaatacaaatataatgaacattaatgaaaataaaaatattccaaaagcaaaaaataagtcagaaagtgaaaatgaaccaaaagctggaactgacagtcctgtttcttgtgcttctataactgaagaacgtgtggcatcagatagtcccaaacctgctctgaccctgcagcagggtcaagaattttctgctggtggtcaaaatgcagaaaacctttgtcagttctttaaaatttcaccagatttaaacataaagtgtgaaagaaaggatgacttcttaggagctgcagaaggaaaactgcaatgcaatcgtttaatgcctaattcacaaaaagactgtcattgtttaggagatgtcttaattgaaaatacgaaagaatctaaaagccagagtgaggatttgggaagaaaacccatggaaagtagcagtgttgtgagttgcagagacaggaaagatagaagacgttccatgtgttattctgatggtcgaagtttacatttggaaaaaaatggaaatcacacaccatcctccagtgtgggcagctctgtagaaattagtttagaaaattctgaactgtttaaagatttgtctgatgccattgagcaaacctttcagaggagaaatagtgaaaccaaagtgcgacgtagcacgaggctacagaaggatttagaaaacgaaggtcttgtatggatttcacttccacttccttccacttcccaaaaagccaaaagaagaacaatatgtacatttgacagcagtggatttgaaagtatgtctcccataaaagaaactgtgtcctccagacaaaaaccgcagatggcacctcccgtctcagatccagaaaacagccagggccctgctgctggttcttccgatgaacctggtaagaggaggaagagcttttgtatatctacacttgcaaatactaaagccacttcccagttcaaaggctaccggagaagatcctctcttaatgggaagggagagagctctctgactgccttggaaaggattgaacataatggagaaagaaagcagtaattgacatttcctgcagagtctgtagcaagagggaaagtaaccatctatgctgaaatgatctgtctagttcccattctctgttcaacctcagtgtttcaaaagttcctaataaataaactcatttgagttgaacctacttttatgtagaaataaataagtttcttcatcatt

SEQ ID NO: 20 - DNA, 2770 bp, Homo sapiens; identical to SEQ ID NO: 11

SEQ ID NO: 21 - DNA, 1180 bp, Homo sapiens
gagccacgattcagtcccctggactgtagataaagaccctttcttgccaggtgctgagacaaccacactatgagaggcactccaggagacgctgatggtggaggaagggccgtctatcaatcaatgtgtaaacctattactgggactattaatgatttgaatcagcaagtgtggacccttcagggtcagaaccttgtggcagttccacgaagtgacagtgtgaccccagtcactgttgctgttatcacatgcaagtatccagaggctcttgagcaaggcagaggggatcccatttatttgggaatccagaatccagaaatgtgtttgtattgtgagaaggttggagaacagcccacattgcagctaaaagagcagaagatcatggatctgtatggccaacccgagcccgtgaaacccttccttttctaccgtgccaagactggtaggacctccacccttgagtctgtggccttcccggactggttcattgcctcctccaagagagaccagcccatcattctgacttcagaacttgggaagtcatacaacactgcctttgaattaaatataaatgactgaactcagcctagaggtggcagcttggtctttgtcttaaagtttctggttcccaatgtgttttcgtctacattttcttagtgtcattttcacgctggtgctgagacaggggcaaggctgctgttatcatctcattttataatgaagaagaagcaattacttcatagcaactgaagaacaggatgtggcctcagaagcaggagagctgggtggtataaggctgtcctctcaagctggtgctgtgtaggccacaaggcatctgcatgagtgactttaagactcaaagaccaaacactgagctttcttctaggggtgggtatgaagatgcttcagagctcatgcgcgttacccacgatggcatgactagcacagagctgatctctgtttctgttttgctttattccctcttgggatgatatcatccagtctttatatgttgccaatatacctcattgtgtgtaatagaaccttcttagcattaagaccttgtaaacaaaaataattcttgtgttaagttaaatcatttttgtcctaattgtaatgtgtaatcttaaagttaaataaactttgtgtatttatataataataaagctaaaactgatat

SEQ ID NO: 22 - DNA, 857 bp, Homo sapiens
caagcctggaagaactcgtcatgctctttgtagcgtggtgcttctgttgctcacaggacaacttgcctttgatgattttcaagagagttgtgctatgatgtggcaaaagtatgcaggaagcaggcggtcaatgcctctgggagcaaggatccttttccacggtgtgttctatgccgggggctttgccattgtgtattacctcattcaaaagtttcattccagggctttatattacaagttggcagtggagcagctgcagagccatcccgaggcacaggaagctctgggccctcctctcaacatccattatctcaagctcatcgacagggaaaacttcgtggacattgttgatgccaagttgaagattcctgtctctggatccaaatcagagggccttctctacgtccactcatccagaggtggcccctttcagaggtggcaccttgacgaggtctttttagagctcaaggatggtcagcagattcctgtgttcaagctcagtggggaaaacggtgatgaagtgaaaaaggagtagagacgacccagaagacccagcttgcttctagtccatccttccctcatctctaccatatggccactggggtggtggcccatctcagtgacagacactcctgcaacccagttttccagccaccagtgggatgatggtatgtgccagcacatggtaattttggtgtaattctaacttgggcacaacaaatgctatttgtcatttttaaactgaatccgaaagaaactcctattataaatttaagataatgtaatgtatttgaaagtgctttgtataaaaaagcacatgataaaaggaatcagaattaataaaatgtttgttgatc

SEQ ID NO: 23 - DNA, 9580 bp, Homo sapiens
cttggtcacatggtggcacggccgctgcgtcagtcacagccctggctgcaggagtccagctgccgtcgccgccgccagcggacggggcggggatcctggtgccaggtcttcgttaacccgcccccgccgcctcagtcagctgtcccagcccgggcccgaccgtcatggagcggtgcggggcctacgcctgttccgtgtgaggcgcatcgctgccgccgccgccgacgccgccttcgtttgtcgaggcctccggaacccccgccgcctcccggagcccctcgcccttggcagcctgtcaccgccccctgggcgggctcgaatgcgcgtccggtgaaggtgcaggcccggcgccgccactgccgcagccaggagatggttcgggcctagcggagccgggactggagcaacatgaaccgtgaagaccggaatgtgctgcgtatgaaagaacgggaaaggcggaatcaggaaattcagcagggcgaagacgccttcccacctagctctcctctctttgcagagccatacaaagttactagcaaagaagataagttatcaagtcgtattcagagtatgcttggaaactacgatgaaatgaaggatttcataggagacagatctataccaaagcttgttgcaattcccaagcctacagtaccaccatcagcagatgaaaaatctaacccaaatttctttgaacagagacatggaggctctcatcagagtagcaaatggactccagtaggacccgcacccagcacttctcagtctcagaaacggtcctcaggcttacagagtggacatagtagccagcggaccagcgcaggtagcagtagtggcactaacagtagtggtcagaggcacgaccgtgagtcatataacaatagtgggagcagtagccggaaaaaaggccagcatggatcagaacactccaaatcacgttcttccagccctggaaaaccccaggctgtttcttcattaaactctagtcattccaggtctcatgggaatgatcaccatagcaaggaacatcaacgctccaaatcacctcgggaccctgatgcaaactgggattctccttcccgtgtacctttttcaagtgggcagcactcaactcaatctttcccaccctcattgatgtcaaagtccaattcaatgttacagaaacccactgcctatgtgcggcccatggacggacaggagtccatggaaccaaagctgtcctctgagcactacagcagccaatcccatggcaacagcatgactgagctgaagcccagcagcaaagcacatctcaccaagctgaaaataccttcccaaccactggatgcatcagcttctggtgatgtgagctgtgtggatgaaatcctaaaagagatgacgcattcatggcctccccctctaacggctattcatacaccatgcaaaacagaaccttccaaatttccttttccaactaaggagtctcagcagtccaattttggcactggagaacaaaaaagatataatccttctaaaacttcaaatgggcaccagtctaaatctatgttaaaagatgacttaaaactaagcagcagtgaagacagtgatggggaacaggattgtgataagacaatgccgaggagtacaccaggaagtaactctgaaccttcacaccataatagtgaaggagcagataactccagggatgattctagtagccacagtggatctgaaagcagctctggatctgactcagagagtgaaagtagttccagtgacagtgaggcaaatgagccatcccagagtgcatctcccgagcctgaacccccgccaacaaacaaatggcaacttgataattggctgaataaagtgaacccacataaagtgtcacccgcctcttcagtggacagtaacatcccatcatctcaaggctacaaaaaggaaggccgagagcagggcactgggaatagctacactgatacaagtggacctaaagaaacgagttccgctactccgggacgagactccaaaaccatccaaaagggatcagaaagtgggcgtgggaggcagaaatctcctgcacagagtgacagcacaacacagagaagaactgtaggcaaaaaacaacccaaaaaggctgagaaggcagctgctgaagagcctcgtggaggcctgaagatagaaagtgaaacccctgtagacttggctagcagcatgccctccagcagacacaaagcagccaccaaaggctcaaggaaacccaatataaagaaggagtctaagtcttcccctcgacctacagcagagaaaaagaaatataagtcaacaagtaaatcttcccagaaatcaagggaaatcatagaaacagatacctcatcctcagattcagatgaaagtgagagccttcctccttcctcacaaactcctaagtaccccgagagcaataggactcctgttaaaccctcctcagtggaggaagaagatagcttttttcggcaacgaatgttctctcctatggaagagaaggaacttctttcacccctcagtgagcctgatgacaggtacccacttattgtgaagattgacctgaatcttttgactagaataccaggaaagccttacaaagaaacagagccgcccaagggggaaaagaaaaatgtgccagaaaagcacacgagagaggctcagaaacaagcctcagaaaaagtttccaacaaaggcaagaggaagcataagaatgaagatgataaccgagccagtgagagcaagaaacccaaaacggaggacaagaattcagcaggccataagccatccagcaacagagagtcatctaagcagagtgctgcaaaagaaaaggatttgttgccttctcccgctgggcctgttccttcaaaagatccaaaaacagagcatggctctcggaagaggactattagtcagtcttcttccttaaagtcaagcagtaacagcaacaaggagacgagtggcagcagcaaaaacagttcctccacatcaaagcagaagaagaccgaagggaagacttccagtagctccaaggaggttaaggaaaaggctccaagtagctcctctaactgtcctccatctgcaccaactcttgattcttctaagcctcggagaacaaagcttgtctttgatgacagaaattattcagcagaccattatttacaagaagcaaaaaagctaaagcacaatgcagatgcattgtctgataggtttgagaaagctgtatactatcttgatgctgtggtatctttcattgaatgtgggaatgcattagagaagaatgctcaggaatccaaatccccattccctatgtattcagagacggtggatctcatcaaatacactatgaagctaaagaattacttggcaccagatgctacagctgcagataaacgactcacagtactttgcctgcgatgcgagtctttgctgtacctgaggctgttcaaactgaagaaggaaaatgctctgaagtactcaaagacactgacagagcacctgaagaattcttataataattctcaagcaccatcgcctggcttgggaagcaaagctgtggggatgccttcccctgtttctccaaagctgtcaccaggcaattcaggaaattattcatctggggccagtagtgcttctgcaagtggttcttcagtgaccattccacagaagatccaccagatggcagccagctatgttcaggtcacatccaacttcctctatgccaccgaaatttgggaccaagctgaacagctttccaaagagcaaaaagaattctttgctgaactggataaagtaatgggccctctcatctttaatgcaagcatcatgacagatctagttcgttatacccggcagggactgcactggcttcgccaggatgccaagttgatatcttgaactgaacacattctcgttgcctctgattttctccacaacactgtgtcacatcacgaaggaaaactgccataacataccacctagtcgacactaagaatgaggaatagttttctcctcgttggttcatgtgttgttgtttttgataatccaaagcgatcatgtcagttggccctttaatatttccaatgtgaaagattatttaaatgcttttaaatctgcagcacattgataagatggtttccgtgagctatgataagattgaaattccagttgcaattcataactaatgaattgaaattttatttattttaatttttttaagttcccagattggggctagtttaagacttagttatttctgcctataaatttactctgttgaatatttagcataaatttaatgtagacatttttatttatataccttgggagctttattacctaatatctttttgtggtagctgttctaagagtaagaattggttcgtctaaaataaggacatattctttctacacctgctacctgacctgatatttgaaatcttaactccaattttattattgtggaatttacagttagtattaaggatattcttctacacatgaaaaaatcacttaaatatgagaaaatggcattctacatgtatgtactatgaaatgtgtctgatttggtatgcattatttcaaaaactgtgaatgtgtgttaataacactacagcaatcacacagtgactatagcttgcatttaatgcattacaaaagagggaggacaaactttctagaagaagcatttcatgttgaagggtttcataaaaggacaatcctgaacgttacggattttattaaaaccatatgttattttttgttgctaatcatttgacacttaatcgaaacagaataagttactgtggaaaaaaggatgatccaactcctgaggattgccgcctgtgtgtctttaattgattatctttgatagttagagttatttttcagatttttccccctcatactggattgtgatgctctgatatgagcatgcaatgactgatacagaaataggctggagcttcggtgtgtgcttttgctatacagcttacagttctaatgcctgatgtagagatgatgaatttctcctttttaaacctatcttctgtttactccttttgcattatgaaggccctcttcaatgatgtatgtttctgatggaatcagaaaatttcacactagaaaagtgtacctaacttgattcagtgtgagctcttgggacagggagtggagccaggggtagagcttaaagaagctggctctgtaagagttgtatatcaaagtaccttttgctacaaggtgcatatagaagtctaagataagaaatgtaccctctatactttatttttcatgcccctatcatgtttggtgtgccttaaatcttacctttaaatgaagactctatggattgtttacaaatgaagttttacactaggaccagatcgtccatacatgattggtcttctacaataataatgttcaattctttcattttaaatctttctttagggtcatataaagattagttctttcagaaaagctattgctttggtacatgacttagtctaaccagttgggtaatgctgctttgaaaaatagtttgtccctctccccattccaaaaatgaatccattcagtcagaaaaaaagattatcctactatttgtagatgattgctaaggcttgaaataggaaaggggaaagaagggatagaaaagtttcaagtccagtagtgcagtgaatcctttgtgtttgagacttttttacacttatttctgaagttagtgaactttcattgtccctgtggcctcatatttatagagcttcttaactgttttgtacctcagattgtttttagatgtcattgaagattgagatgtacaaattatgttgaatttaacctgtttctcttggagaaattgcctctgatatctttctaacttaatcttagtgtgttctaggaacagttttccataagaggacaacttctcaatgatcatgatagttatttagtaagaaataatggttgttaatcaaatacatgttatgtcttgtccttctctgatttttctgacttggattccttaatttgcagtgatgtcttagaaatggaaaaagtatcctctgggctttcagactttcagcaacaacagccagtgggatacctctgagttcttgtgttctagtctcttgtatgtcctgaaaggcagcaggagcatttttggggtcacactgatattttgttaaagcagagtttcctgcatggtttatggtgctgctctaatattttctctttaaaactgtgtcaatttttggagaatgaatttttcaaccttttcattgtggaggatttttcccacaaggtagtaatgggcaatggatcaaaatcctatcataaatgattgaattttcaatgtcatagtgtgtggaaatactactccctttcctccatgtctatcttcttagatgttctgtctttgtcatcatctgctccagcacatactttggactcctttacaggtgaccttcccccctccctcctcaataggtgtcctcagtgttttctaagcatttaaaactgaatttgacaagtggctaaaaacttagtctgagacttgtacttagtatatggttaattatagaaacaacaactattttaaacagttactctgttgactgctctttatgactacacttgtatgccaggaggcagcagcctatacaccattagactctttacaagcaaccaacgaaccaattgcagtggttgcagttgtcacagtagtcttgcctgggccagactgggctgggctgtgggaagcattccccttcaggggagtttccacagctcagcccaggctccagtctggctagagagcatccagcccattccttgcctcagtgccacctttttctgggcaagtagccaagaagtgactttatatgcagtgagtacttcagataaacttacagctacagctgccgaagagtggagaaggttgaccaccatttatttaattctctagtgtaaaaacaattgagagcagtgtgcgtgagcccacagacacctgtgtttctgggagctctggcagtggcggattcataggcacttgggctgcactttgaatgacacacttggctttattagattcactagtttttaaaaaattgttgttcgtttcttttcattaaaggtttaatcagacagatcagacagcataattttgtatttaatgacagaaacgttggtacatttcttcatgaatgagcttgcattctgaagcaagagcctacaaaaggcacttgttataaatgaaagttctggctctagaggccagtactctggagtttcagagcagccagtgattgttccagtcagtgatgcctagttatatagaggaggagtacactgtgcactcttctaggtgtaagggtatgcaactttggatcttaaaattctgtacacatacacactttatatatatgtatgtatgtatgaaaacatgaaattagtttgtcaaatatgtgtgtgtttagtattttagcttagtgcaactatttccacattatttattaaattgatctaagacactttcttgttgacaccttgaatattaatgttcaagggtgcaatgtgtattcctttagattgttaaagcttaattactatgatttgtagtaaattaacttttaaaatgtatttgagcccttctgtagtgtcgtagggctcttacagggtgggaaagattttaattttccagttgctaattgaacagtatggcctcattatatattttgatttataggagtttgtgtctgggtcccaggaacatctactggggatgactgttaggcagcttgtgatgatgttttttaaaaaacctaagtaacttggggagacagagcatttcaaacccatatagacacctatcatacctgtatatcccctaatacatggaacataaatttcatttcagctttatgcattaatgtattgaagaggcaggctttttttccagtaataatactgtacatctaaggttgctattcagtaaaactaatagaagagataattattgaataccttggaatatgtagtgagaagaggccaaatttttcatgtttgtgagcatgtctttcagatactcgctaatggagaaattcactttagacctctagaccccaaaaccaagttagcaagtgacaaaaagtaaattattaatagtctgtaaagtggatgctggtcttacaaagctcctattcacatgaaccctatggttaattagaaagaacttgctgtctccagaaaagggaatggaaataataactatgtatcttcttttcatgtaatttggtcacagaataaggtattcaagttaagtctaatccaagtcttagagatctttaagtatcctaaaatagcagcctaagtagtcatcatgtaaagaagttgactttcaggaatgtcagcattgacctctccttgccactgttactcagctaaacataacttgccattcttaaaaataaaaaagctcccacccagaaactctagtgatactcagttttgacctcttactgcttccatgtgggacttcttttcagcttttaaccattggaattttctacctgctatgttcctctctggaaaatatcaatttggaaatgctgcctttcaaatcaatgccatgatcatccatattgttgagtttgttgttggtgttccagaagtgtccccattttacaactttatgcacacacctggcaaatcattaacatgagcattcaacagtactgggatgggtggggtgggggtagggggctcaccaacagaactggccagttgacattgcctgaaaaggcaccacctttaagggccagttgtggggttggtaagcacagttatgaaaatttctatctagcctccgttttgaatggttttaagaaattttgtatatggaggatggaaatgcttatatatttattgaaaatccttttatttgaaattaaaattatttggtatataattgtttgatatttggggagggttttggaggggagataatgtcactgataaattaaaagcctgttgattttgcagaaaggtactgttagtgactgataaggatgcctttgttttgtacatgaaccaaatctttgttttacatttcttttatccaaaatatttaggcatctgacattttcaaccagaatttcaattatatactgtgatttttatttgttgcaatacattacaatttcagaggtactttggggctcaaaagctaggatttctaagtcagtatgtgcatttcacacgataaagctgttaatggtgagcaaagtattatatactaactagatttttccacatctgtatagtatattatatgtattttgtggtattgagagtatagaaagtttagagtgtcaaacatgcgtttaatgtgtatttttaaacaaatttatggcaattaaaatatttggagacaagggtatcacatttcaatttgtaaagatctttttaactctactgtgtcattaagatgctttgtacaatgccaaaccatagttggagaaactaagtttaataaatatcaaatagattttctgtattaaagttactgaacactgta

SEQ ID NO: 24 - DNA, 1684 bp, Homo sapiens
cagaggcagcagccggagcagccgcagcctgcgccctctcccgcccgcccgccctccgcccgcccgcccgccctccgccgccctccacccgccccggggtctctttcccccttcctcctcctcctcctccacccccccttcctcctccgcccgcccgcggggcccccctcgccttcccgcccgcccctattgttccgcccccggcctcccgcccttccccttcccgcccgctccccttttcccctcagtcgcctcgcgcctgcagtttttggctttcacccccaaccagtgaccaaagacttgaccactcaaagtccagctccccagaacactgctcgacatggacaccggtgtgattgaaggtggattaaatgtcactctcaccatccggctacttatgcatggaaaggaagttggcagtatcatcggaaagaaaggagaatcagttaagaagatgcgcgaggagagtggtgcacgtatcaacatctcagaagggaattgtcctgagagaattatcactttggctggacccactaatgccatcttcaaagcctttgctatgatcattgacaaactggaagaggacataagcagctctatgaccaatagcacagctgccagtagacccccggtcaccctgaggctggtggtccctgctagtcagtgtggctctctcattggaaaaggtggatgcaagatcaaggaaatacgagagagtacaggggctcaggtccaggtggcaggggatatgctacccaactcaactgagcgggccatcactattgctggcattccacaatccatcattgagtgtgtcaaacagatctgcgtggtcatgttggagactctctcccagtcccccccgaagggcgtgaccatcccgtaccggcccaagccgtccagctctccggtcatctttgcaggtggtcaggacaggtacagcacaggcagcgacagtgcgagctttccccacaccaccccgtccatgtgcctcaaccctgacctggagggaccacctctagaggcctataccattcaaggacagtatgccattccacagccagatttgaccaagctgcaccagttggcaatgcaacagtctcattttcccatgacgcatggcaacaccggattcagtggcattgaatccagctctccagaggtgaaaggctattgggcaggtttggatgcatctgctcagactacttctcatgaactcaccattccaaacgatttgattggctgcataatcgggcgtcaaggcgccaaaatcaatgagatccgtcagatgtctggggcgcagatcaaaattgcgaacccagtggaaggatctactgataggcaggttaccatcactggatctgctgccagcattagcctggctcaatatctaatcaatgtcaggctttcctcggagacgggtggcatggggagcagctagaacaatgcagattcatccataatccctttctgctgttcaccaccacccatgatccatctgtgtagtttctgaacagtcagcgattccaggttttaaatagtttgtaaattttcagtttctacacactttatcatccactcgtgattttttaattaaagcgttttaattcctttctctgttcagctgttgatgctgagatccatatttagttttataagcttctccctggttttttttttttgg

SEQ ID NO: 25 - DNA, 3464 bp, Homo sapiens
cgcgccgctctcgtctgatccctgctggggacggttgcccgggcaggatcctttacgatcccttctcggtttctccgtcgtcacagggaataaatctcgctcgaaactcactggaccgctcctagaaaggcgaaaagatattcaggagcccttccattttccttccagtaggcaccgaacccagcattttcggcaaccgctgctggcagttttgccaggtgtttgttaccttgaaaaatggctactggacaggatcgagtggttgctctcgtggacatggactgtttttttgttcaagtggagcagcggcaaaatcctcatttgaggaataaaccttgtgcagttgtacagtacaaatcatggaagggtggtggaataattgcagtgagttatgaagctcgtgcatttggagtcactagaagtatgtgggcagatgatgctaagaagttatgtccagatcttctactggcacaagttcgtgagtcccgtgggaaagctaacctcaccaagtaccgggaagccagtgttgaagtgatggagataatgtctcgttttgctgtgattgaacgtgccagcattgatgaggcttacgtagatctgaccagtgctgtacaagagagactacaaaagctacaaggtcagcctatctcggcagacttgttgccaagcacttacattgaagggttgccccaaggccctacaacggcagaagagactgttcagaaagaggggatgcgaaaacaaggcttatttcaatggctcgattctcttcagattgataacctcacctctccagacctgcagctcaccgtgggagcagtgattgtggaggaaatgagagcagccatagagagggagactggttttcagtgttcagctggaatttcacacaataaggtcctggcaaaactggcctgtggactaaacaagcccaaccgccaaaccctggtttcacatgggtcagtcccacagctcttcagccaaatgcccattcgcaaaatccgtagtcttggaggaaagctaggggcctctgtcattgagatcctagggatagaatacatgggtgaactgacccagttcactgaatcccagctccagagtcattttggggagaagaatgggtcttggctatatgccatgtgccgagggattgaacatgatccagttaaacccaggcaactacccaaaaccattggctgtagtaagaacttcccaggaaaaacagctcttgctactcgggaacaggtacaatggtggctgttgcaattagcccaggaactagaggagagactgactaaagaccgaaatgataatgacagggtagccacccagctggttgtgagcattcgtgtacaaggagacaaacgcctcagcagcctgcgccgctgctgtgcccttacccgctatgatgctcacaagatgagccatgatgcatttactgtcatcaagaactgtaatacttctggaatccagacagaatggtctcctcctctcacaatgcttttcctctgtgctacaaaattttctgcctctgccccttcatcttctacagacatcaccagcttcttgagcagtgacccaagttctctgccaaaggtgccagttaccagctcagaagctaagacccagggaagtggcccagcggtgacagccactaagaaagcaaccacgtctctggaatcattcttccaaaaagctgcagaaaggcagaaagttaaagaagcttcgctttcatctcttactgctcccactcaggctcccatgagcaattcaccatccaagccctcattaccttttcaaaccagtcaaagtacaggaactgagcccttctttaagcagaaaagtctgcttctaaagcagaaacagcttaataattcttcagtttcttccccccaacaaaacccatggtccaactgtaaagcattaccaaactctttaccaacagagtatccagggtgtgtccctgtttgtgaaggggtgtcgaagctagaagaatcctctaaagcaactcctgcagagatggatttggcccacaacagccaaagcatgcacgcctcttcagcttccaaatctgtgctggaggtgactcagaaagcaaccccaaatccaagtcttctagctgctgaggaccaagtgccctgtgagaagtgtggctccctggtaccggtatgggatatgccagaacacatggactatcattttgcattggagttgcagaaatcctttttgcagccccactcttcaaacccccaggttgtttctgccgtatctcatcaaggcaaaagaaatcccaagagccctttggcctgcactaataaacgccccaggcctgagggcatgcaaacattggaatcattttttaagccattaacacattagtgctgccctcaggcttgcctgtaggatttaatattttttatctttacaggtctttatctttaatattttatctttacagatttccctgagaaagggaattatgaaatttttaatacaaaaaataatccatttaggtgctgagttacggtcccatctcttcacaggcatggattctaatcccactgctgacagagatgtaaaaattcatcctaccagagtttttaatctttagcatttagggaggcagtgtcataaagtaaaaagtgtgtgggccttggagtctaagagacgtggttgcaaacttagctctggttattgcaatgagggccttgaacaagtcattttcttcacattctcatctgtaaaatggagataataccttacagattattgcagattaataacaatgtattcaaattatgtaactcggccgggtacaatggctcacgcctgtaatcctaacactttgggaggccgaggcagacagatcacctgaggtcaggagtttgagaccagcctggccaacatggcaaaaccatctctactaaaaatagaaaaattagccaggcacgttccaggcacctgtgatcccagctacttggaggctgaggcagaagaattgctttaaccttggaggcggaggttgcattgagctgagatcatgctagtgcgctccagcctgggcaacagagcgagacttcatctcagaaaataaaaaataggggccaggcacagtggctcatacctgtaatgccagcactttgggaggccaaggcgggcagatcacgaggtcaggagtttcagaccaatatggtgaaaccccatctctactaaaattacaaaaaaaattatccaggcgtggtggtgcacgcctgtgatcccagctactcgggaggctaaggcaggagaatcacttgaacccaggaggcagaggttggggtgagctgagattgcgccaccgcactccagcctgggcaacagagcgagactccatctcaaacaaaaacaagaacaaaaacaaacataaagttggcacagaaaagggaccaagtttaaaaaagggttttaaatgtaatgagacttgc

SEQ ID NO: 26 - DNA, 2313 bp, Homo sapiens
gggtagctgggactacaggcgcccgcgaccacgcccggctaatttttttttgtatttttttttagtagagaccgggtttcgccgtgttagccaggatggtctcgatctcctgacctcgtgatccacccgccttggcctcccaaagtgctgggattacaggcgtgagtaaccgcacccggcagtagtacctactttttaaagtgtaagcaaggaaagttggcccgcacctgtagtcccatctacctgggaggctgaggtggaagaattgcttgagcccagttggtcgaggctgcaatgagccttgatcacgccactgcactccagcctgggcaacagaacaagaccctgtctcaaacaaaaaagtgtatgtaagaataaaaattaatagattaggcacaggatgggtgtttaattctcggcaatcaccactaagttttcatactgaggcttattcattccatgggcaaaacattgcgctatgtgtggtgcctggggtgggctccaaattccagtcctctcctcgcttgcgatagctgtgtgatccattcctaagtttccttatttgtccacagagcgtacacagggtttttatgaaaactagatcagataatcagacacagttaaaatagcacgcgctcagtaaaattacatattagtggaagagacaagccttgaataaatcgcctttcggggagtatgaccccctccccgaaacccactcaggcgctgctcgctcgcacgcccactgagctcggagcggagcccgagccctttcccagcacacagggttcatttccagactgaaagacatcccagagacaactccagaggccaaggcgggtcggcttcctgcgtgggcccagcgccgggcactgaaaggtgaaggcgcttcttccgctcggaggaaagcctctggcggttctcgcttcgcgggctcgggatggacacgcgcgtagggctggggaggtgacgcgcggacaacgccggggcgagcaaactacaactcccaggcagctgtgcgccacgcgggcggcctactgtcgggtgtggccgcgaggggcggcctatataagctcttgctcgcggcttcagcgccctttctccccgccgcattcccggtgtcgacttactagctgcaagcctctgcctgccttcctgcgcgccgttccccgctagtcgctgctgctggcgcgcactcgccgggtttttcctcccacggcctcgagatggtggtgaatgtggcacggaggagccgggccttccaacccggtgggcccgagctccgaaaggccccctcggcagtgagaggggcgggagcccgcgggggccgcgcccttctctcgcttcggactgcgcaacgctgcgctctgggctgacaggcggataaaacggtcccatcaagactgagaaaaagcacaccagctattggcacagcgtgggcagtggggcctacaggatgactgacttagtctacagagatcccggcgtacttaagcaggtagtaatgatggacaggtgaggctttaggcggccgccctgggatctgaattgccccttggcccttatcgaagctgcagctgcttccgcatagctgctgtggtcaaaaaggagcccagagtgacagttttccttgacggtcgccgttctgtttgttgtaactgatctgcaacattttgggaaaatacagttccattgtacctgccacctttcagctgtagccagagacctttatcaaaatgggcttgtttccacagaacagcagaacggttgggggtttgcatgtacagttaaccagcataagactcgtactgggaaaatccagctgggatgtgacacagcttaactgatagcttaaggcatcagtattgggaccaaaggctggtcagatttgtatcattctgaggaccaaatgatgggaacaataaaattgttcatgacagttgttctcattttgctgtccagatgaagactcttaagatgacagaaggtgatttttctggtgatcgaggacttccggggtaatgacagtgatgaaatgcaggggacctggttgcccccaagtttcctggcagtgtgtgatactgaggaggtgagcttgtttctggagctgtgctttaagattcatgttacatgtaaagctgtcctcatttgtgactatggacctatggagttgggacaatctctatgggaagcagaaggcaaggaccccggtcattttaggtagaaacaacagcatgctaatgcaaaaaattatgcagtgtgctactgaacttcagaggtgatcaataaaagaagaataaaaagactaataaa

SEQ ID NO: 27 - DNA, 2169 bp, Homo sapiens
gtccccgccgtgcgcccttcgccgctgagctcgcagcctccggcgcccacctccacctccagtgtcccgcctcgggccgtcgccctccagcggctcgcgagcgtgggagacgtacctgggcaggcactgtccagcccaggcccaggcacagccgtgaggggcgaggcacggggacatcctggcggccaccatggtggccacgtgcctgcaggtggtgggcttcgtcacgagcttcgtgggctggatcggggtcatcgtgaccacctccaccaatgactgggtggtgacctgcggctacaccatccccacctgccgcaagctggatgagctgggctccaaggggctgtgggccgactgcgtcatggccacggggctgtaccactgcaagcccctggtggacatcctcatcctgccgggctacgtgcaggcctgccgcgccctgatgattgctgcctcggtcctgggtctgccggccattttactgctgctgactgttcttccctgcatccggatgggccaggagcccggtgtggctaagtacaggcgggcccagctggctggtgttttgctcattctgctggctctctgcgcccttgttgccaccatctggttccctgtgtgcgcccaccgtgagaccaccatcgtgagctttggctactccctgtatgcaggctggattggtgctgtgctgtgcctcgtgggtggctgtgtcatcctctgctgcgctggagatgcccaggcctttggtgaaaaccgtttctactacactgcgggctctagctccccgactcatgcgaagagtgcccacgtataagagggctgcccggctgcccacagaggtgctgtagatgctgggcccagggccctaggtttgctcgtcacagtgtggggaagcccattcctctgccaggctctaaagccaaaggtctagaaaagcatcctgtctggcattttgtagtcttaacttctccccatttcccccatcttttggttgccttaaaagaaatctctagctcagataatgcccagacatttttttcccttggtgttgcccctattagctcttttcttgggcattcttttgctgtttattaaaaatatattatatatattttgtttctttaaatttcaaatgttttgcaaacatcactgagttaggtgggggtggggaagagaaatacaagatacttttttttttttttttttttttttttttttaaatagggcctcactctgttgctcaggctggagtgcggtggtgtgatctcggctcatgtagcctcaacctccccggctcaagtgatcctcctgcctcagcctcccaagtagctgggactacaggcgttcactactacacccagctaatttttaagttttttatagagatgagggctccctatgttgcccaggttggtctcgaactcctggactcaaagtatcctcccgcctcggcctcccaaagtgttgggattataggagtgagccaccacaccaggccaagatgcttttcaaactgatacagatgacaatgggagcctcataaagatggcttttgtttcttcccttcaaggtcatttacttgtacgagacagaaaaagatagcattggggacatgggatgggggagggagggcaatagtggaacgaactttccatgggaaactttcccttttgtaagttgagggccaggggtagggatattttttagtttgtgattttacatttatctgtacatactttttcaagattgatcatttttataaccatggttttcctgaaatcctcaattcatcaatatgaaggaaatgaaccacatagactttatgcaataaataacagtgcaagtgagtataactctaactgatgttccacaaaacatttttgatttcaggtttgtatgatgtagtttttaatcgtacattttcatatgcttcaaactaacacatttttaaagctttcccccacttttctctctatttgtattgttagccatcttgaagtgatgttgtttaacataaattgtactgttgaatttggctttacgggtgtaaacactgatggtatatcagtatctgagaccccaaactctccaaatactgatggtgcattttattcttgaagtgaaatctgtgcaataaaataacagactgtctgcaaaaaaaaaaaaaaa

SEQ ID NO: 28 - DNA, 1865 bp, Homo sapiens
ggtgtctctggccgctgcgctccaccccagcccgccatggcgtcaggcgccgcggccccggggaggtggctcccactttaagaagtgaagttttgcgcccctccccctccctgcccacctcctgcagcctcctgcgccccgccgagctggcggatggagctgcgcagcgggagcgtgggcagccaggcggtggcgcggaggatggatggggacagccgagatggcggcggcggcaaggacgccaccgggtcggaggactacgagaacctgccgactagcgcctccgtgtccacccacatgacagcaggagcgatggccgggatcctggagcactcggtcatgtacccggtggactcggtgaagacacgaatgcagagtttgagtccagatcccaaagcccagtacacaagtatctacggagccctcaagaaaatcatgcggaccgaaggcttctggaggcccttgcgaggcgtcaacgtcatgatcatgggtgcagggccggcccatgccatgtattttgcctgctatgaaaacatgaaaaggactttaaatgacgttttccaccaccaaggaaacagccacctagccaacgggatagctgggagtatggccaccctgctccacgatgcggtaatgaatccagcagaagtggtgaagcagcgcttgcagatgtacaactcgcagcaccggtcagcaatcagctgcatccggacggtgtggaggaccgaggggttgggggccttctaccggagctacaccacgcagctgaccatgaacatccccttccagtccatccacttcatcacctatgagttcctgcaggagcaggtcaacccccaccggacctacaacccgcagtcccacatcatctcaggcgggctggccggggccctcgccgcggccgccacgacccccctggacgtctgtaagacccttctgaacactcaggagaacgtggccctctcgctggccaacatcagcggccggctgtcgggtatggccaatgccttccggacggtgtaccagctcaacggcctggccggctacttcaaaggcatccaggcgcgtgtcatctaccagatgccctccaccgccatttcttggtctgtctatgagttcttcaagtactttctcaccaagcgccagctggaaaatcgagctccatactaaaggaagggatcatagaatcttttcttaaagtcattctctgcctgcatccagccccttgccctctcctcacacgtagatcattttttttttgcagggtgctgcctatgggccctctgctccccaatgccttagagagaggaggggacggcacggccgctcaccggaaggctgtgtgcggggacatccgaggtggtggtggacaggaaggacttgggaaggggagcgagaaattgctttttctcttcctccctgggcagaatgtagcttttctgcttcactgtggcagcctcctccctggatccttagatcccagaggagggaagaaaatttgcagtgactgaaaacagtaaaaaaaaaaaaaaaaaaaaaaaaaaaaaaaaaaaaaaaaaaaaatttatgtatataaaagttgcattacacagtacaaaatagatggataatgtttatcctttatttttctatgtagaagtttttgaatttgtgtgtgtgcttgtgcgtgtctacacctagtattacggctgggactctccagctgtttttgttgttgttatgtttttaagagggttgaattcttccatcaggtgaacgaaaaaggcaacaaagtaataaatcagtgaatgtggccggcagctgtgtttagcccctccagatggaagtttcacttgaatgtaaaataataaagtttatattttgaa

SEQ ID NO: 29 - DNA, 5936 bp, Homo sapiens
gctgtcctggccgcgcccctgtcccgccgcctcccgctcctcgcctggcggatgtaggttgttggcctgaggggagctacgtagccgaggtttgcgctgccgccgccaggcccggtccggttccagcctctgcccggacgctagccggcctggccatggctgaccgcgggtgcccgctggaggcggcgccgctgcctgccgaggtgcgggagagcctggctgagctggagctggagctgtcggaaggtgacatcactcaaaaaggatatgaaaagaaaagggcaaagctgcttgcacgttatataccgcttattcaaggaatagacccatctctgcaagcagagaatagaattcctgggccctcacaaaccacggccgctgcacccaagcagcagaagtctcggcccaccgcctcgagggatgagcgcttccggtcagatgtccacactgaagccgtgcaagcagctttggccaaatacaaagagaggaagatgcctatgccttcgaagagacgttctgtccttgtgcattcgtctgtggaaacctacacccctccagacacgtcgtctgcctcagaagatgagggctctttacggcgacccgggcgactcacctccactccgctccagagccattccagcgtcgagccctggctcgaccgggtcattcagggctcgtccacctcatcctctgcatcctccacctcatctcacccgggagggagacccaccactgctcccagtgctgcagccacgccgggggccgccgctaccactgcactcgcaggcctcgaggcccacacccacatagatctgcattctgcccctcctgatgtcaccacgggcctcgtggagcattcgtactttgagcgtccacaggtggcttctgtgagaagtgttcctcgggggtgcagcgggagcatgctggaaacagcagatggtgtccctgtgaacagcagagtgtcctccaaaatccagcagcttctgaacaccctgaagaggccaaagcgccctccactgaaggagttctttgtggatgattttgaggaattgttggaagttcagcaaccagatccaaatcagccaaagcctgagggaagcgagacgagtgtgctgagaggggagcctctcactgcaggtgtcccccgaccgccgtcgctgttggccaccttgcagcgctggggcacaacacagcccaaatccccctgtctgactgccttggatacaactgggaaagccgtctacactctcacctatggtaaactttggagtcggagtttaaaactagcttatactctacttaataaactgacaagtaagaatgaacctctacttaaacctggagacagagtggcgctcgtgtttccgaatagtgaccctgtgatgttcatggttgcattttatgggtgtctcctggcagagctggttcctgtccccatagaagtgccattaacaagaaaggatgcaggcagccagcaggttgggtttctgctgggcagctgtggagtcttcttggccctgaccacagacgcttgtcagaaaggcctccccaaggcacagacaggagaggtggcagctttcaaaggttggcccccgctctcctggctagtgattgatgggaagcatctagccaagcccccaaaggactggcaccctctggcccaggacacagggactgggactgcctacattgagtataaaaccagcaaagaaggcagtacggtgggggtcacagtgtcccacgcatccctgctggcacagtgccgggctctgacccaggcgtgcgggtactcagaagctgaaacattaacaaacgtgctggatttcaaaagggatgctggtctgtggcatggcgtgttaacaagcgtcatgaacaggatgcacgtggtcagcgtcccctacgcgctgatgaaggcgaacccactctcctggatccagaaagtgtgcttctataaagctcgggccgcgctggtgaagtcgcgagacatgcactggtctctcctagctcagcggggccagagggacgtcagcctcagctcactgcgcatgctgattgtggccgatggtgccaacccgtggtcgatctcctcctgtgacgccttcctcaacgtcttccagtccagaggtctgaggccagaggtcatctgtccttgtgcaagttctcctgaggcgctgactgtcgccatccgcaggccacctgatctgggaggaccacctccaagaaaagcagtcctgtcgatgaacggtctaagttatggtgttatcagagtggatactgaagaaaagttgtcagtccttactgttcaggacgttggtcaggtgatgcctggagctaatgtatgtgttgtgaagttagaaggtaccccttatctttgtaaaactgatgaagtgggagaaatatgcgtcagttccagtgcaactggcacagcgtactatggattgcttggaatcacgaagaatgtgtttgaggcagttccggtcaccacaggaggagcacccatctttgacaggccattcaccaggacaggcctgctgggcttcatcgggcctgacaacctggtcttcatcgtgggcaaactggacgggctgatggtcactggagttcgcagacacaatgcagatgacgttgtggccaccgcactggccgtggagcccatgaagtttgtctacagaggcaggatcgctgtgttctctgtgaccgtgctgcacgacgaccggattgtcctggtggctgagcagcggccggatgcctcggaggaggacagcttccagtggatgagccgtgtgctgcaggccattgatagcatccaccaggtgggcgtgtactgtctggccctggttcctgccaacaccttgcccaaggctcctctcggagggattcacatttctgaaaccaaacagcgctttctggaagggacgctgcacccgtgtaatgtgctgatgtgccctcacacctgtgttaccaacctccccaaacctcgtcagaaacaaccagaggttggaccagcctcaatgatcgtggggaacctggttgctgggaagagaatcgctcaggcttccgggagagagctcgcccacctggaggacagcgaccaggcacggaagttcctgttcctggctgacgtgctgcagtggcgtgcccacaccactcctgaccacccgctgttcttgctgctgaacgccaagggcaccgtcacaagcactgcaacctgtgtccagctgcacaaaagggctgagagagtggccgcggctctgatggagaagggaagactgagtgttggggaccatgtggctctggtctacccaccaggggtggacctcattgccgcgttctatggctgcttgtactgtggctgcgtgcctgtcaccgtgcggcccccgcaccctcagaacctcggcaccacactgcccaccgtcaagatgatcgtggaggtcagcaagtctgcatgcgtcctcaccacgcaggctgtcacacggctgctcaggtccaaggaggctgctgctgccgtggacatcaggacctggcccaccatcctagacacagatgacatcccaaaaaagaagatagcaagcgttttcaggcccccctcccccgatgtcctcgcatacttggacttcagcgtgtcaaccactgggatattagcgggagtgaagatgtcgcacgcggccacaagcgccttatgccgctccataaagctgcagtgtgagctgtacccctcgcggcagatcgccatctgcctcgacccctactgtggccttggttttgccctgtggtgtctgtgcagtgtctactcgggacaccaatcagtgctggtgcccccgctggagctggagagcaacgtgtccctgtggctgtcggccgtcagccagtacaaggcccgcgtcaccttctgctcctactctgtgatggagatgtgcaccaagggcctaggcgcacagacgggtgtcctcaggatgaagggggtgaacctgtcatgtgtgcgcacgtgcatggtggtcgccgaggagcggcccaggattgcgctgacccagtccttctccaagctcttcaaggacctgggcctgccggcccgcgccgtaagcaccacgttcgggtgcagggtcaacgtggccatctgcctccagggcacagctggcccggaccccacaaccgtctacgtggacatgcgggcactgcgccatgacagggttcgtttggtagaacggggttctccgcacagcctgccattgatggagtctggaaagatcctccccggcgtgaaggtcatcatcgcacacaccgagaccaaaggacccttgggagactcacacctgggagagatctgggtaagcagcccccacaatgccaccgggtactacaccgtttacggggaggaggcgcttcatgccgaccacttcagtgcccggctgagttttggagacacacagaccatctgggcaaggaccggctaccttggcttccttcggcgaacagagctcactgatgccagtggagggcggcacgatgcactgtatgtggttgggtctctggatgaaactctggagctcagaggcatgcggtaccaccccatcgacattgagacctctgtcatccgagcacacaggagcatcgctgagtgtgccgtattcacctggaccaacctgctggtggtggtggtggagctggatgggctagagcaggatgccctggacctggtggccctggtgaccaacgtggtgctggaggagcactacctggtcgtgggagtggtggtcatcgtggacccaggggtgatccctatcaactctcggggtgagaagcagcgcatgcacctgcgggacggcttcctggctgaccagctggaccccatctatgtcgcctacaacatgtgagcgcagcacaccggcccaggtgccggagatgaatgagccccagcagtccaaggtgtgatgtgggaagacaccgcagagctcactcaccgggactcgcccttcctgtgctcttacagatccctctcaacaatccccgcatctccttttagaaagcacttcctgaattatttaaagaaatattttgaatctgccaagtacatttacaaaaacacggatgctggtattttaacagatggagagacaaggaaaggaaaggaaaggcctggcatgggcattgtgaggaatcacaggcaccgaggttgttctctgctgtactgcaagtttgcactttctttaggctaaaaatatagttcctgatttttaaaattcagttatttattcccacttcaaatgacaagttcatatatagaatttacgggagaaacttgagaccatttacggggagaaacttgattctgggaagatagcagagtacaaaccagctgcctcacttctgtttcacagggaggctgatggaaaaaggaagcaagctggacccatcctccctgctcacagagggcactgtggtcacacacagtgcctcctctgccagttcctttattgaaagaggtgtgctggctggccacggtggcttacacctgtaatcccagcactttgggaggccgaggcgagcagatcacgaggtcaggagaccgagaccatcctggctaacatggtgaaaccctgtctctactaaaaatacaaaaaattagccgggtgtggtggtgggcgcctgtagtcccagctacttgggaggctgaggcaggagaatggtatgaaccagggaggcggagcttgcagtgagccgagatcacgctactgcactccagcctgggtgacagcacgagatgccgtcttaaaaaaacaaaaaagaggtgtgctgcttgtcagcatgtattgtcacggacactcaataagtgccattttggactgtcaaatttagatgctttgtttcagaaagataagccagcatttagttttaaatcactttcctggtttgtaacttgatgctgtttagttaaattg

SEQ ID NO: 30 - DNA, 1039 bp, Homo sapiens
gctcgtccgctccctcccccgcgccgtgcacgtcttggttcgggccgggcataaaaggcttcgcggcccagggctcacttggcgctgagaacgcgggtccacgcgtgtgatcgtccgtgcgtctagcctttgcccacgcagctttcagtcatggcctccggtaacgcgcgcatcggaaagccagcccctgacttcaaggccacagcggtggttgatggcgccttcaaagaggtgaagctgtcggactacaaagggaagtacgtggtcctctttttctaccctctggacttcacttttgtgtgccccaccgagatcatcgcgttcagcaaccgtgcagaggacttccgcaagctgggctgtgaagtgctgggcgtctcggtggactctcagttcacccacctggcttggatcaacaccccccggaaagagggaggcttgggccccctgaacatccccctgcttgctgacgtgaccagacgcttgtctgaggattacggcgtgctgaaaacagatgagggcattgcctacaggggcctctttatcatcgatggcaagggtgtccttcgccagatcactgttaatgatttgcctgtgggacgctccgtggatgaggctctgcggctggtccaggccttccagtacacagacgagcatggggaagtttgtcccgctggctggaagcctggcagtgacacgattaagcccaacgtggatgacagcaaggaatatttctccaaacacaattaggctggctaacggatagtgagcttgtgcccctgcctaggtgcctgtgctgggtgtccacctgtgcccccacctgggtgccctatgctgacccaggaaaggccagacctgcccctccaaactccacagtatgggaccctggagggctaggccaaggccttctcatgcctccacctagaagctgaatagtgacgccctcccccaagcccacccagccgcacacaggcctagaggtaaccaataaagtattagggaaaggtgtgaaaaaaaaaaaaaaaaaaaaaaaaaaaaaaaa

SEQ ID NO: 31 - DNA, 2143 bp, Homo sapiens
ttcccttactgagcttgctgagctccggggcccgcggagctcgcgccaggctcctgggaaaggacggggagtgttaccggggagcagctgctccattgtgcctcgaggccccgatcgggctaggccgacggcctccctcccttcacctttcctctcctggcggggttcggcggcgggcgagtgactgcggccacgcctgaaaggcgactctcctgattcaagatgaccaacgaagaacctcttcccaagaaggttcgattgagtgaaacagacttcaaagttatggcaagagatgagttaattctaagatggaaacaatatgaagcatatgtacaagctttggagggcaagtacacagatcttaactctaatgatgtaactggcctaagagagtctgaagaaaaactaaagcaacaacagcaggagtctgcacgcagggaaaacatccttgtaatgcgactagcaaccaaggaacaagagatgcaagagtgtactactcaaatccagtacctcaagcaagtccagcagccgagcgttgcccaactgagatcaacaatggtagacccagcgatcaacttgtttttcctaaaaatgaaaggtgaactggaacagactaaagacaaactggaacaagcccaaaatgaactgagtgcctggaagtttacgcctgatagccaaacagggaaaaagttaatggcgaagtgtcgaatgcttatccaggagaatcaagagcttggaaggcagctgtcccagggacgtattgcacaacttgaagcagagttggctttacagaagaaatacagtgaggagcttaaaagcagtcaggatgaactgaatgacttcatcatccagcttgatgaagaagtagagggtatgcagagtaccattctagttctgcagcagcagctgaaggagacacgccagcagttggctcagtaccagcagcagcagtctcaggcctctgccccaagtaccagcaggactacagcttctgaacctgtagaacagtcagaggccacaagtaaagactgcagtcgtctgacaaacggaccaagtaatggtagctcctcccgccagaggacgtctgggtctggatttcacagggagggcaacacaaccgaagatgactttccttcttctccagggaatggtaataagtcctccaacagctcagaggagagaactggcagaggaggtagtggttacgtaaatcaactcagtgcggggtatgaaagtgtagactctcccacgggcagtgaaaactctctcacacaccaatcaaatgacacagactccagtcatgaccctcaagaggagaaagcagtgagtgggaaaggtaatcgaactgtgggttcccgccacgttcagaatggcttggactcaagtgtaaatgtacagggttcagttttgtaatattttttcagcaaatttttatacagtgtcatttaatttgggagaggatactgtccagaaaattaatgcatacttttgtcacaatttgcctttttgtgggtgtacgttttggtttttttttgttgttttttttctttgttttttttttcttttctttttttttttttttttttttttttgcttcaatacttctgccgctttggaaattgtaacagttaattactttgaatgttgctaaaaggacattttgtgtagggtcaagttatttttatatgagttaatgtgaaattgtaaatggaaatttttccttaaaatacaacacaatgatgtctgtataaatctgtctgtttagaatctgtgctgtgtaagggcattcgtactcatgctgttactgtacttatgcaccattcagacttgttagagtagatgtgggtttatgactgccaagtttgcccagtacagtagttttttatcactaaaagttggactcattgatggagtcctgtagtagtttcagtgttagatacagttttttccaccatacatctgtgcattttctctttaggtgactgtttaagaaatttgtgtgcatagttactcagtttttatgaactgttgtatcctgttaatgcatattgctctgtgactccagtatatcttacctgtactgaccaaacctaaataaagatttttattgtaactccttaaaaaaaaaaaaaaaaaaaaaaaa

SEQ ID NO: 32 - DNA, 4724 bp, Homo sapiens
cgcctaagcggcggaactctggagagtgcggaacctaggatcctaggaaactgaaggcaacggaacctgggggcgatggaatccgggagcggtggaacccggagcctgtagaacttgaatctagaggaacctgacagcggcgccgagggggccacccggactctgtttggaacggaagcacagtgtccgccgcttcctggttgcgggtcagcgcccaggtcctgggctggccgccgggatgttgccctacacagtgaacttcaaggtgtcggcgcgcaccctcacgggggccctcaacgcccacaacaaggcggcggtggactggggctggcaaggtttaattgcttatggatgtcattcacttgtggtagtgattgattccattactgcccaaactcttcaagttttagaaaagcataaagctgatgttgtaaaggttaaatgggccagggaaaactatcaccataacattggctcaccatattgcttacggttagcttctgctgatgtcaatgggaagatcatcgtctgggatgtagcagcaggagtagctcagtgtgagatccaagagcatgccaagcctatccaggatgttcagtggttgtggaatcaagatgcttcccgcgatttactgcttgctatccacccgccaaattacattgtgctctggaatgccgacactggcaccaaactatggaagaagagctatgcagataacattctttctttttcttttgacccttttgatccctcacatttaactttgcttaccagcgagggtattgttttcatctcagacttctccccatccaagcctccctcaggccctgggaaaaaagtttacatatccagcccacactctagcccagctcataacaagctggccacagccacaggtgccaagaaagctctaaataaagtaaaaattttaatcactcaagagaaacctagtgctgaattcataactctcaatgattgccttcagttggcatacctgccttcaaaaaggaatcacatgttgttgctctatcctcgagagattttaatccttgaccttgaggtgaatcagacggtgggtgtgattgcaatagaacgcacaggagttccatttttacaggtaataccctgctttcagcgtgatggtttattttgtctacatgaaaatggttgtataactttacgtgttcgaagatcttataataacatttttaccacttcaaatgaggaaccagatccagatccagttcaggagcttacctatgatttacgaagccagtgtgatgcaatcagggtgacaaaaaccgtccgtcccttcagtatggtgtgctgtcctgtcaatgagaatgcagccgccctcgtagtgagtgatggcagggtcatgatatgggaactcaagtctgcagtttgtaatcgaaattcacggaacagtagttctggtgtgtcacctttatattcaccagtgtctttctgtggaattcctgtaggagtgctacagaataaactcccagacctttccttagataacatgattgggcaaagtgcaattgctggggaagaacatcccagaggttcaattctgcgggaagtgcacctcaagttcctgctgacgggactgctttcaggactgcccgcaccacagtttgctattcgtatgtgtccaccgttgaccacaaaaaacatcaagatgtatcagccactgctggctgttggtacaagtaatggttctgtcctggtgtaccatctcaccagtggtctgctacacaaagagttaagcatccactcatgtgaagtcaagggtattgaatggacaagtttgactagttttctttcttttgctacctcaacaccaaacaatatgggattagtgagaaatgaacttcaactggttgatcttccaacaggtaggagcattgcttttcgtggtgaaagaggcaatgatgaatctgccatcgaaatgattaaagtatctcatttgaagcagtatttggcagtcgtattcagagataaacccctggagctatgggatgttaggacttgtacccttcttagagagatgtccaaaaacttccctacaataactgctttggagtggtcaccatctcacaacttgaagagcctgagaaagaagcaacttgcaactcgagaggccatggcccgccagaccgtagtctcagacacagagctgagtattgttgaatcatctgtgatcagcttgctgcaggaggcagaaagtaaatctgaacttagtcagaacatctctgcccgggaacattttgtatttaccgatattgatggccaagtgtatcatctcactgttgaaggaaactcagtaaaagacagtgctcggattccaccagatggaagtatgggtagtattacctgcatcgcttggaaaggtgatacattagtgcttggagatatggatggaaatttaaatttctgggacttgaaaggcagagtatccagaggaatacccacacaccgaagttgggtgaggaagattcgttttgctcctggtaaaggaaatcaaaaattaatagcaatgtacaatgatggagctgaagtgtgggatactaaagaggttcagatggtgagcagtttaagaagtggcagaaatgtgacctttcgtatattggatgtggactggtgtacgtcagataaagtgatcttggcctcagatgatgggtgcatcagagtcctagagatgtctatgaagtctgcgtgctttagaatggatgaacaagagttaaccgagcctgtgtggtgcccctatctccttgttccaagggcctctcttgccttgaaagccttcttattacaccagccttggaatggacagtattctttggacatttctcatgttgactatccagaaaatgaagaaataaagaatctcctccaagaacagttgaattcattgtctaatgacataaagaaactgttgcttgatccagaattcactctcttgcagaggtgcctgcttgtttcaaggctctatggtgatgaatcggagctgcacttctggactgtcgctgcccactacctgcacagcttatcccaggaaaagtcagccagcacaacagctcctaaagaagctgctcctcgagacaaactgagcaacccactggatatatgctatgacgtgctctgtgaaaatgcctactttcagaaatttcagctagaaagggttaatctacaggaagtgaaacggtcaacttatgatcatacaaggaaatgtacagaccagctactgctcttgggtcaaacagacagagctgtgcagttgctgttggaaacaagtgcagataaccagcattattactgtgattcactgaaagcctgtttagtcactactgtcacctcgtcaggcccctctcagagcaccattaagttggtggcaacgaatatgattgccaatggcaaattggcagagggcgttcagttgctctgcctgatagataaggctgcagacgcctgccgctacctgcagacatacggcgagtggaatcgggctgcatggctggcaaaagtccgtttgaatcctgaggagtgtgccgatgttttaaggcggtgggttgaccacctttgttctccacaagtcaatcagaaatcaaaggctctcctggttctcctctctctgggctgcttttttagcgtggcagagacgcttcacagcatgagatactttgatagagcagccttatttgtggaagcttgcctcaagtatggagcatttgaagtcactgaggacacagagaaactcatcactgctatatatgcagattatgcccggagtttgaagaacctcggttttaagcagggagcagttctctttgcttcaaaagccggagcagctggcaaagacttattgaatgagcttgagtcccccaaggaagaacccattgaagagtgacagcttaataaatgccagggaatctgacctggaaggcagatgggagggggctggtctggctgtggccaccgtcacagtccaggatgaagaggagtacagggtcctgtgagctgtttgaccactgttctaagactatgtgtgcccaaaagcacataagcatctatgttgagagtaagtttgtatcctgcgttggtctcagaaagaacgtgaatgcttaagattttgaaagtacataatattttatactttgggagagagctttaagagtccctggaaatactttttaatttttttaacttaaaattcaagagactgaatcacttttctcattgattaaatgtaaagattattgagaaacctatagtaaatgaaatttgtgagatgttttctcaaatatatgctgtgcctgtacttatatacagtctttcaagagagatacaaacaaggcagaaacatttaaactagtattaaaggtagtttaccaaagcattttttgttttcttaccttgaaaacacagaaccgttaattccttggtttaagcagttgctaagttttgtaattttaggctcagaggaccataggaggttttaagatttatgtttagtccgataggtgaggtctttgatattttgaattttaactccttttatgatacatcacagtaacctcatttttgaagtctttctttgtactttaatgttctctctgttctaatagttgaagtatgagatgtaactattataaactgttgctgaaaacataaatgtctgtaacttacaaacatgataaataaattaaaaattccatcca

SEQ ID NO: 33 - DNA, 1202 bp, Homo sapiens
gccgccggatggcgtaggatcggccgctggtggtggtgataccgggtacccgggctatggcgccggcgcagcgctgccctctgtgccgccagaccttcttctgtggtcgcgggcacgtttacagccgcaagcaccagcggcagctgaaggaggctttggagaggctcctgccccaggtggaggcggcccgcaaggccatccgcgccgctcaggtggagcgctatgtgcccgaacacgagcgatgctgctggtgcctgtgctgcggctgtgaggtgcgggaacacctgagccatggaaacctgacggtgctgtacggggggctgctggagcatctggccagcccagagcacaagaaagcaaccaacaaattctggtgggagaacaaagctgaggtccagatgaaagagaagtttctggtcactccccaggattatgcgcgattcaagaaatccatggtgaaaggtttggattcctatgaagaaaaggaggataaagtgatcaaggagatggcagctcagatccgtgaggtggagcagagccgacaggaggtggttcggtctgtcttagagcctcaggcagtgccagacccagaagagggctcttcagcacctagaagctggaaagggatgaacagccaagtagcttccagcttacagcagccctcaaatttggacctgccaccagctccagagcttgactggatggagacaggaccatctctgacattcattggccatcaggatataccaggagttggtaacatccactcaggtgccacacctccctggatgatccaagatgaagaatacattgctgggaaccaagaaataggaccatcctatgaagaatttcttaaagaaaaggaaaaacagaagttgaaaaaactccccccagaccgagttggggccaactttgatcacagctccaggaccagtgcaggctggctgccctcttttggccgcgtctggaataatggacgccgctggcagtccagacatcaattcaaaactgaagctgcagcaatgaagaagcagtcacatacagaaaaaagctaatcatgctctctaccaactaccatgaggctaaaagcaaagtcaacaaacccctattataccttccaccaaattctttatcattgtctttcttaggaaacagacatactcattcatttgatttaataaagttttatttttccaaatgta

SEQ ID NO: 34 - DNA, 10724 bp, Homo sapiens
ctttccaatatccgtcttcggagcgcacgggaatccgccgagctctgcgtgcaggcccttttttcttttgaggttcacattttttgaaattttacgccagggcttttgtaatttcctcccccgcccgctgacggtcctggagtcgctcggggctttaggccggttatgcaacgtgtaccgctcggggctgccggctgcacctccgccgcgcctcgccgctcactgcgctagacccggcgccccgcgtctcgcttcgcgggcagtcagggggccggcgctctgtcgaggtctccagctagagcagggagcccgagcccgagggagtccccggagccgacgaagggcttattagaccctgactcttttctgaggcgcgcagattttgtctttgatcactccctctccgcgggtctacggccgcgcgctttcggcgccggcgatggggagaagacggaggctgtgtctccagctctacttcctgtggctgggctgtgtggtgctctgggcgcagggcacggccggccagcctcagcctcctccgcccaagccgccccggccccagccgccgccgcaacaggttcggtccgctacagcaggctctgaaggcgggtttctagcgcccgagtatcgcgaggagggtgccgcagtggccagccgcgtccgccggcgaggacagcaggacgtgctccgagggcccaacgtgtgcggctccagattccactcctactgctgccctggatggaagacgctccctggaggaaaccagtgcattgtcccgatttgtagaaatagttgtggagatggattttgttcccgtcctaacatgtgtacttgttccagtgggcaaatatcatcaacctgtggatcaaaatcaattcagcagtgcagtgtgagatgcatgaatggtgggacctgtgcagatgaccactgccagtgccagaaaggatatattggaacttattgtggacaacctgtctgtgaaaatggatgtcagaatggtggacgttgcatcggacccaaccgctgtgcttgtgtttatgggttcactggtccacagtgtgaaagagattacaggacaggcccgtgtttcactcaggtcaacaaccagatgtgccaagggcagctgacaggcattgtctgcacgaagactctgtgctgtgccaccattggacgggcgtggggccatccctgtgagatgtgtccagcccagcctcagccctgccgacggggtttcatccccaacatccgcactggagcttgccaagatgttgatgaatgccaggctatcccagggatatgccaaggaggaaactgtatcaatacagtgggctcttttgaatgcagatgccctgctggtcacaaacagagtgaaactactcagaaatgtgaagacattgatgagtgcagcatcattcctgggatatgtgaaactggtgaatgttccaacaccgtgggaagctatttttgtgtttgtccacgtggatatgtaacctcaacagatggctctcgatgcatcgatcagagaacaggcatgtgtttctcgggcctggtgaatggccgctgtgcacaagagctcccggggagaatgacgaaaatgcagtgctgctgtgagcctggccgctgctggggcatcggaaccattcctgaagcctgtcctgtcagaggttctgaggaatatcgcagactttgcatggatggacttccaatgggaggaattccagggagtgctggttccagacctggaggcactgggggaaatggctttgccccaagtggcaatggcaatggctatggcccaggagggacaggcttcatccccatccctggaggcaatggcttttctcctggcgttgggggagccggtgtgggggccgggggacagggacctatcatcactggactaacaattctgaaccagacaatagatatctgtaagcatcatgctaacctttgtttaaatggacgctgtataccaactgtctcaagctaccgatgtgaatgcaacatgggttataagcaggatgcaaatggagattgtatagatgttgatgaatgcacatcaaatccctgcactaatggagattgtgttaacacacctggttcctattattgtaaatgtcatgctggattccagaggactcctaccaagcaagcatgcattgatattgatgagtgcatccagaatggggttctttgtaaaaacggtcgatgcgtgaacacagatggaagtttccagtgcatttgcaatgccggctttgaattaactacagatggaaaaaactgtgttgatcatgatgaatgtacaactaccaacatgtgtttgaatggaatgtgcatcaatgaagatggcagcttcaagtgcatctgcaaaccaggatttgtcttggctccaaatgggcgttactgtactgatgttgatgaatgccagaccccaggaatctgcatgaatgggcactgcatcaacagtgaagggtccttccgctgtgactgtcccccaggcctggctgtgggcatggatggacgtgtgtgtgttgatactcacatgcgcagtacctgctatggaggaatcaagaaaggagtgtgtgtgcgtcctttccccggtgcagtgaccaagtccgaatgctgctgtgccaatccagactatggttttggagaaccctgccagccatgccctgcaaaaaattcagctgaattccacggcctttgtagtagtggagtaggtatcactgtggatggaagagatatcaatgaatgtgctttggatcctgatatatgtgccaatgggatttgtgaaaacttacgtggtagttaccgttgtaattgcaacagtggctatgaaccagatgcctctggaagaaactgtattgacattgatgaatgtttagtaaacagactgctttgtgataacggattgtgccgaaacacgccaggaagttacagctgtacgtgcccaccagggtatgtgttcaggactgagacagagacctgtgaagatataaatgaatgtgaaagcaacccatgtgtcaatggggcctgcagaaacaaccttggatctttcaattgtgaatgttcgcccggcagcaaactcagctccacaggattgatctgtattgacagcctgaaggggacctgttggctcaacatccaggacagccgctgtgaggtgaatattaatggagccactctgaaatctgaatgctgtgccaccctcggagccgcctgggggagcccctgtgagcggtgtgaactagatacagcttgcccaagagggcttgccaggattaaaggtgttacgtgtgaagatgttaatgagtgtgaggtgttccctggcgtttgtccaaatggacgctgtgtcaacagtaagggatcttttcattgcgagtgccctgaaggccttacgttggatgggactggccgtgtatgtttggatattcgcatggagcagtgttacttgaagtgggatgaagatgaatgcatccaccccgttcctggaaagttccgcatggatgcctgctgctgtgctgtcggggcggcttggggcaccgagtgtgaggagtgccccaaacctggcaccaaggaatacgagacgctgtgcccccgcggggctggctttgctaaccgaggggatgttcttactgggcggccattttacaaagacatcaatgaatgcaaagcatttcctgggatgtgcacttatgggaagtgcagaaatacaatcggaagcttcaaatgccgttgcaatagtggctttgctctagacatggaggaaagaaactgcacggacatcgacgagtgcaggatttctcctgacctctgtggcagtggaatctgcgtcaatacaccgggcagctttgagtgcgagtgcttcgaaggctatgaaagtggcttcatgatgatgaagaactgcatggacattgacgaatgtgaacgtaaccctctcctttgtaggggtggcacctgtgtgaacactgagggcagctttcagtgtgactgcccactgggacacgagctgtcaccatcccgtgaggactgtgtggatattaatgaatgctccctgagtgacaatctctgcagaaatggaaaatgtgtgaacatgattggaacctatcagtgctcttgcaatcctggatatcaggctacgccagaccgccagggctgtacagatattgatgaatgtatgataatgaacggaggctgtgacacccagtgcacaaattcagagggaagctacgaatgcagctgcagtgagggttatgccctgatgccagatgggagatcgtgtgcagacattgatgaatgtgaaaacaatcctgatatctgtgatggcggccagtgtaccaacattcctggagagtatcgctgcctctgctatgatggcttcatggcttccatggacatgaaaacatgcattgatgtcaatgaatgtgacctaaattcaaatatctgcatgtttggggaatgtgagaacacaaagggatccttcatttgccactgtcagctgggttactcagtgaagaaggggaccacaggatgtacagatgtggatgagtgtgaaattggtgctcataactgcgacatgcatgcctcatgtctgaatatcccaggaagcttcaagtgtagctgcagagaaggctggattggaaacggcatcaagtgtattgatctggacgaatgttctaatggaacccaccagtgtagcatcaatgctcagtgtgtaaataccccgggctcataccgctgtgcctgctccgaaggtttcactggtgatggctttacctgctcagatgttgatgagtgtgcagaaaacataaacctctgtgagaacggacagtgccttaatgtcccgggtgcatatcgctgcgagtgtgagatgggcttcactccagcctcagacagcagatcctgccaagatattgatgaatgctccttccaaaacatttgtgtctttggaacatgtaataacctgcctggaatgtttcattgcatctgcgatgatggttatgaattggacagaacaggagggaactgtacagatattgatgagtgtgcagatcctataaactgtgtcaatggcctatgtgtcaacacgcctggtcgctatgagtgtaactgcccacccgattttcagttgaacccaactggtgtgggttgtgttgacaaccgtgtgggcaactgctacctgaagtttggacctcgaggagatgggagtctgtcttgcaacaccgagatcggggtgggcgtcagtcgctcttcatgctgctgctctctgggaaaggcctggggaaacccctgtgagacatgcccccctgtcaatagcactgaatattacaccctgtgtcccggaggtgaaggcttcagacctaaccccatcacaatcattttagaagacattgacgaatgccaggagttaccaggtctctgccagggtggaaactgcatcaacacttttgggagcttccagtgtgagtgcccacaaggctactacctcagcgaggatacccgcatctgtgaagatattgatgagtgttttgcacatcctggtgtgtgtgggcctgggacctgctataacaccctgggaaattacacctgcatttgcccacctgagtacatgcaggtcaatggaggccacaactgcatggacatgagaaaaagcttttgctaccgaagctataatggaaccacttgtgagaatgagttgcctttcaatgtgacaaaaaggatgtgctgctgcacatataatgtgggcaaagcctggaacaaaccttgtgaaccatgcccaactccaggaacagctgactttaaaaccatatgtggaaatattcctggattcacctttgacattcacacaggaaaagctgttgacattgatgaatgtaaagagattccaggcatttgtgcaaatggtgtgtgcattaaccagattggcagtttccgctgtgaatgccctacaggattcagttacaatgacctgctgttggtttgtgaagatatagatgagtgcagcaatggtgataatctctgccagcggaatgcagactgcatcaatagtcctggtagttaccgctgtgaatgtgccgcgggtttcaaactttcacccaatggggcctgtgtagatcgcaatgaatgtttagaaattcctaacgtttgcagtcatggcttgtgtgttgatctgcaaggaagttaccagtgcatctgccacaatggctttaaggcttctcaggaccagaccatgtgcatggatgttgatgagtgcgagcggcatccatgtggaaatggaacttgtaaaaacaccgttggatcctataactgtctgtgctacccagggtttgaactcactcataataatgattgcctggacatagatgagtgcagttccttttttggtcaggtgtgcagaaatggacgttgttttaatgaaattggttctttcaagtgtctatgtaacgaaggttatgaacttaccccagatggcaaaaactgtatagacactaatgagtgtgtcgcccttcccggctcttgctctcctggtacctgtcagaatttggagggatccttcagatgcatctgtcccccagggtatgaagtaaaaagcgagaactgcattgatataaatgaatgtgatgaagatcccaacatttgtctttttggttcctgtactaatactccagggggcttccagtgcctctgcccccctggctttgtactatctgataatggacggagatgctttgatactcgccagagcttctgcttcacaaattttgaaaatggaaagtgttctgtacccaaagctttcaacaccacaaaagcaaaatgctgctgtagtaagatgccaggagagggctggggggacccctgtgagctgtgccccaaagacgatgaagttgcatttcaggatttgtgtccatatggccatggaactgtccctagtcttcatgatacacgtgaagatgtcaatgagtgtcttgagagcccaggcatttgttcaaatggtcaatgtatcaacaccgacggatcttttcgctgtgaatgtccaatgggctacaaccttgactacactggagtacgctgtgtggatactgatgagtgttcaatcggcaatccgtgtggaaatggtacatgcaccaatgttattgggagttttgaatgcaattgcaatgaaggctttgagccagggcccatgatgaattgtgaagatatcaacgaatgtgcccagaacccactgctgtgtgctttccgctgcatgaacacttttgggtcctatgaatgcacgtgcccgattggctatgccctcagggaagatcaaaagatgtgcaaagatctggatgaatgtgctgaagggttacacgactgtgaatctaggggcatgatgtgtaagaatctaatcggcaccttcatgtgcatctgccctcctggaatggcccgaaggcccgatggagaaggctgtgtagatgaaaatgaatgcaggaccaagccaggaatctgtgaaaatggacgttgtgttaacattattggaagctatagatgtgagtgtaatgaaggattccagtcaagttcttcaggcactgaatgccttgacaatcgacagggtctctgctttgcagaggtactgcagacaatatgtcaaatggcatccagtagtcgcaatctcgtcactaagtcagaatgctgctgtgatggtgggcgaggctggggccaccagtgcgagctttgcccacttcctggaactgcccagtacaaaaagatatgtcctcatggcccaggatatacaactgatggaagagatattgatgaatgtaaggtaatgccaaacctctgcaccaatggtcagtgcatcaataccatgggctcattccgatgcttctgcaaggttggctacaccacagacatcagtggaacctcttgtatagaccttgatgaatgctcccagtccccgaaaccatgcaactacatctgcaagaacactgaggggagttatcagtgttcatgtccgagggggtatgtcctgcaagaggatggaaagacatgcaaagaccttgatgaatgtcaaacaaagcagcataactgccagttcctctgtgtcaacaccctgggggggtttacctgtaaatgtccacctggtttcacacagcatcacactgcttgtatcgacaacaacgaatgtgggtctcaaccttcgctttgtggagcaaagggaatctgtcaaaacactccaggcagtttcagctgtgaatgccaaagagggttctctcttgatgccaccggactgaactgtgaagatgttgatgaatgtgatgggaaccacaggtgccaacacggctgccagaacatcctgggtggctacagatgtggctgcccccaaggctacatccagcactaccagtggaatcagtgtgtcgatgagaatgaatgctccaatcccaatgcctgtggctctgcttcctgctacaacaccctggggagttacaagtgcgcctgcccctcggggttctccttcgaccagttctccagtgcctgccacgacgtgaatgagtgctcgtcctccaagaacccctgcaattacggctgctctaacacggaggggggctacctctgtggctgcccccctgggtattacagagtgggacaaggccactgtgtctcaggaatgggatttaacaaggggcagtacctgtcactggatacagaggtcgatgaggaaaatgctctgtccccagaagcatgctacgagtgcaaaatcaacggctattctaagaaagacagcaggcagaagagaagtattcatgaacctgatcccactgctgttgaacagatcagcctagagagtgtcgacatggacagccccgtcaacatgaagttcaacctctcccacctcggctctaaggagcacatcctggaactaaggcccgccatccagcccctcaacaaccacatccgttatgtcatctctcaagggaacgatgacagcgtcttccgcatccaccaaaggaatgggctcagctacttgcacacggccaagaagaagctcatgcccggcacatacacactggaaatcactagcatccctctctacaagaagaaggagcttaagaaactggaagagagcaatgaggatgactacctcctaggggagcttggggaggctctcagaatgaggctgcagattcagctctattaacccttcacagacttgggcccaggctcaaatcctagcacagccagtctgcagaagcatttgaaaagtcaaggactaattttaaagaggaaaaataataataactcttgtttctttcctccctgtcttagactttgaatgttgaccctcacagggagggataatttagactctggtatggccaaagatttgagcacaaaggcaaccgtggttactgtattttttatataacttcattttaaaatatattaaaagaaacctaaatgttcaagatatcagcatatggcactaaatgcacaaaaataatgtgagctttttttttttttcctgttagcagtctgtaacactttgggtattttgctatagttgctaattaaaaaaatatagatgtttatttatttttaatgcagtaatatatggagaaatgaacaaactatgtaaacaaaaagggaaactcacttgtttttctttagatttataaatttgagctattttttttagaggtgctttttaaaaatccaatagatacaagagatgtttcctttggttttctgccagtcatccagctgatacacacctgatgattttaaagaaagccacacagagctgaatgggcagtgtaatcaataatttaaaaaacatgaatgtcattagatcctttataacgtagatcgaagccaaagcagctcatttgtgacaacatttcatatcaccagacacaccaggcaacagaagttgaagcacaaccactgtagcaaaataccttgactgcttgtgagaccattagcattgcaggccaaaccgtactgtatttccttctcataacctcaaggaaccatatgtgctacccacaacacctcattcttacccagggtgcgctgcgtcctcatggtactgtaggcagctgaagaaccgccgttcccttgaaagggaacacctggcattctgtggtgtttcgtgctgtcttaaataatggtgcatttattatgttcaagttatttcaggattgccatatgtgcaaacaaatcatgcaatgcagccaaggaatatatgttgttgttgttgttttaaacccattttttttttagaattttcattaatactgtagttatacaccatatgcctcattttatcatagcctattgtgtatgaaagatgtttgtacaatgaattgatgtttagtttgctttagtcatttaaaaagatattgtaccaggatgtgctattaagagcacgtatccattattcttctcaacccaagaacctgtttcctggaccagtgaccaaacctcatatgtgaaatggccaaagcacatgcaggctcctggttgttcctctcaaacctgtgctgaccaaagattagtaaccagttatacccagtattttgaggttttattgtttttttaataactaaaaagaaaaaaggaacagtgtaaatttgtaatcaagagtttgtgaggaaaaacttatggtttttggttttgtttgtttttgtaggtctgtgtatcaaatatgacacttttcttgcaataaagcttattttggggta

SEQ ID NO: 35 - DNA, 3316 bp, Homo sapiens
cactctctttctctctccctctggcatgcatgctgctggtaggagacccccaagtcaacattgcttcagaaatcctttagcactcatttctcaggagaacttatggcttcagaatcacagctcggtttttaagatggacataacctgtacgaccttctgatgggctttcaactttgaactggatgtggacacttttctctcagatgacagaattactccaacttcccctttgcagttgcttcctttccttgaaggtagctgtatcttattttctttaaaaagctttttcttccaaagccacttgccatgccgaccgtcattagcgcatctgtggctccaaggacagcggctgagccccggtccccagggccagttcctcacccggcccagagcaaggccactgaggctgggggtggaaacccaagtggcatctattcagccatcatcagccgcaattttcctattatcggagtgaaagagaagacattcgagcaacttcacaagaaatgtctagaaaagaaagttctttatgtggaccctgagttcccaccggatgagacctctctcttttatagccagaagttccccatccagttcgtctggaagagacctccggaaatttgcgagaatccccgatttatcattgatggagccaacagaactgacatctgtcaaggagagctaggggactgctggtttctcgcagccattgcctgcctgaccctgaaccagcaccttcttttccgagtcataccccatgatcaaagtttcatcgaaaactacgcagggatcttccacttccagttctggcgctatggagagtgggtggacgtggttatagatgactgcctgccaacgtacaacaatcaactggttttcaccaagtccaaccaccgcaatgagttctggagtgctctgctggagaaggcttatgctaagctccatggttcctacgaagctctgaaaggtgggaacaccacagaggccatggaggacttcacaggaggggtggcagagttttttgagatcagggatgctcctagtgacatgtacaagatcatgaagaaagccatcgagagaggctccctcatgggctgctccattgatgatggcacgaacatgacctatggaacctctccttctggtctgaacatgggggagttgattgcacggatggtaaggaatatggataactcactgctccaggactcagacctcgaccccagaggctcagatgaaagaccgacccggacaatcattccggttcagtatgagacaagaatggcctgcgggctggtcagaggtcacgcctactctgtcacggggctggatgaggtcccgttcaaaggtgagaaagtgaagctggtgcggctgcggaatccgtggggccaggtggagtggaacggttcttggagtgatagatggaaggactggagctttgtggacaaagatgagaaggcccgtctgcagcaccaggtcactgaggatggagagttctggatgtcctatgaggatttcatctaccatttcacaaagttggagatctgcaacctcacggccgatgctctgcagtctgacaagcttcagacctggacagtgtctgtgaacgagggccgctgggtacggggttgctctgccggaggctgccgcaacttcccagatactttctggaccaaccctcagtaccgtctgaagctcctggaggaggacgatgaccctgatgactcggaggtgatttgcagcttcctggtggccctgatgcagaagaaccggcggaaggaccggaagctaggggccagtctcttcaccattggcttcgccatctacgaggttcccaaagagatgcacgggaacaagcagcacctgcagaaggacttcttcctgtacaacgcctccaaggccaggagcaaaacctacatcaacatgcgggaggtgtcccagcgcttccgcctgcctcccagcgagtacgtcatcgtgccctccacctacgagccccaccaggagggggaattcatcctccgggtcttctctgaaaagaggaacctctctgaggaagttgaaaataccatctccgtggatcggccagtgaaaaagaaaaaaaccaagcccatcatcttcgtttcggacagagcaaacagcaacaaggagctgggtgtggaccaggagtcagaggagggcaaaggcaaaacaagccctgataagcaaaagcagtccccacagccacagcctggcagctctgatcaggaaagtgaggaacagcaacaattccggaacattttcaagcagatagcaggagatgacatggagatctgtgcagatgagctcaagaaggtccttaacacagtcgtgaacaaacacaaggacctgaagacacacgggttcacactggagtcctgccgtagcatgattgcgctcatggatacagatggctctggaaagctcaacctgcaggagttccaccacctctggaacaagattaaggcctggcagaaaattttcaaacactatgacacagaccagtccggcaccatcaacagctacgagatgcgaaatgcagtcaacgacgcaggattccacctcaacaaccagctctatgacatcattaccatgcggtacgcagacaaacacatgaacatcgactttgacagtttcatctgctgcttcgttaggctggagggcatgttcagagcttttcatgcatttgacaaggatggagatggtatcatcaagctcaacgttctggagtggctgcagctcaccatgtatgcctgaaccaggctggcctcatccaaagccatgcaggatcactcaggatttcagtttcaccctctatttccaaagccatttacctcaaaggacccagcagctacacccctacaggcttccaggcacctcatcagtcatgctcctcctccattttaccccctacccatccttgatcggtcatgcctagcctgaccctttagtaaagcaatgaggtaggaagaacaaacccttgtccctttgccatgtggaggaaagtgcctgcctctggtccgagccgcctcggttctgaagcgagtgctcctgcttaccttgctctaggctgtctgcagaagcacctgccggtggcactcagcacctccttgtgctagagccctccatcaccttcacgctgtcccaccatgggccaggaaccaaaccagcactgggttctactgctgtggggtaaactaactcagtggaatagggctggttactttgggctgtccaactcataagtttggctgcattttgaaaaaagctgatctaaataaaggcatgtgtatggctggtc

SEQ ID NO: 36 - DNA, 2822 bp, Homo sapiens
ggcgcggtacaggagcagcactgccggcgggggcgggtgccagggacttggaggtggaggggacgcggcggtactctggcgtcttccgacttcgactccttaccttaaaagatgctggagtcatatgtaactccaattttaatgagctatgtgaatcgctacatcaagaacttaaagccgtcggatctacagctttcactatggggtggagacgtggtactcagcaagctcgagttaaagttggatgtgctggaacaggaactgaaattaccattcacttttttaagtggacatattcatgaattgaggattcatgtaccatggacaaaactgggttcagaaccagtggtaattaccatcaatactatggaatgcattttgaaacttaaggatgggatacaggatgaccatgaaagctgtggttctaattctaccaaccgtagtactgctgagagcacaaaatcatcaatcaaaccgcggagaatgcagcaggctgctcctacagatcctgacttaccaccaggttatgtgcagagtctgattagacgagttgtaaataatgtaaacattgtgataaataatctcatactaaaatatgttgaagatgatatcgtcctttccgtcaatatcacttctgcagaatgttatacagtaggtgaattatgggatcgtgcattcatggatatttctgcaactgatttggtgctgagaaaggttatcaatttttctgactgtacagtttgtcttgataaacggaatgccagtggtaaaatagaattttaccaggatcctttattatacaaatgttccttcagaactcgtcttcattttacatatgaaaacctaaattccaagatgccatctgttattaaaattcatactttagtggaaagtttgaaactttctatcacagatcaacaactgcctatgtttattcgtataatgcaacttggaattgctctttactatggagaaataggcaattttaaagaaggcgaaatagaggaccttacttgtcataataaagatatgctaggaaacattacaggttctgaagatgaaacaagaatagatatgcaatatcctgctcagcataaaggtcaagagttatattcacagcaagatgaggagcagccacagggatgggtgtcatgggcctggtcctttgtgcctgcaattgtgagttatgacgatggcgaggaagactttgttgggaacgatcctgcatcaaccatgcatcaacaaaaagcacagactttgaaggatcctattgtttctataggattttattgcacaaaggcaacggtgactttcaaactcacagaaatgcaagttgagagtagttattacagtccacagaaagtaaaatctaaagaagtattgtgttgggaacaagaaggaactacagttgaggcccttatgatgggagaacctttctttgattgccagattgggtttgttggttgcagagccatgtgccttaaaggaattatgggtgttaaagattttgaagagaatatgaatagaagtgaaactgaagcctgtttcttcatttgtggtgacaatttgagtacgaaaggtttcacataccttacaaattcattgtttgattaccgaagcccagaaaataatggtactcgcgcagaatttatcttggattcaactcatcataaggagacatacactgagatagctggaatgcaacggtttggggctttttatatggattacctgtatacaatggagaacactagtggcaaaggttccacaaatcaacaagacttttcttcagggaaaagtgaagatttgggaacagttcaggagaagtccaccaaaagccttgttataggtcctcttgattttcgtttggatagcagtgcggtgcataggattttgaaaatgattgtgtgtgccttggaacatgaatatgaaccatatagcaggctaaaatcagatattaaggatgaaaatgaaacaatactgaatcctgaagaggtggctcttctggaggaatatattcctactcgacatacaagtgttactctcctcaaatgtacctgcacaatttccatggctgaattcaacttgctggaccatttactacctgtcattatgggagaaaagaactcaagtaacttcatgaatactacaaacttccagtctcttcggcctttgccatccattcgaatattggtggataaaattaatctggaacattcagtgccaatgtatgctgaacagttggtgcatgtggtcagcagccttactcaaccttctgataacctgcttcattattgttatgtacactgctatcttaagatatttggtttccaggcaggactgacgtctttggattgcagtggatcttactgcttacctgtaccagttattccctctttcagcactgctctttatgggaaacttctgaaactccccacatgctggaccaaaagatctcagattgctataactgaaggtatatttgaacttccaaatctcacaattcaagctacaagagcacagacacttctcttgcaagcaatatatcaaagttggtctcatcttggaaatgtcagctcttccgcagtgattgaagctttgataaatgaaatcttcctaagtatagagattgggtcttgctatgttgcccaggttgatcttgaactcctggcctcaaatgatcctcccacctcaacctcctgaagtgccgggattggaggcccaagccactgtgcctggccctttataaattatgttataatttcatgtaatacataattgtatagtcaaaatggctcacatattaaatattctttatacaa

SEQ ID NO: 37 - DNA, 2986 bp, Homo sapiens
cggcggaggctgcactgagcgggacctgcgagcagcgcgggcggcagcccgggggaagcgtccgggaccatgtctggagaactaccaccaaacattaacatcaaggaacctcgatgggatcaaagcactttcattggacgagccaatcatttcttcactgtaactgaccccaggaacattctgttaaccaacgaacaactcgagagtgcgagaaaaatagtacatgattacaggcaaggaattgttcctcctggtcttacagaaaatgaattgtggagagcaaagtacatctatgattcagcttttcatcctgacactggtgagaagatgattttgataggaagaatgtcagcccaggttcccatgaacatgaccatcacaggttgtatgatgacgttttacaggactacgccggctgtgctgttctggcagtggattaaccagtccttcaatgccgtcgtcaattacaccaacagaagtggagacgcacccctcactgtcaatgagttgggaacagcttacgtttctgcaacaactggtgccgtagcaacagctctaggactcaatgcattgaccaagcatgtctcaccactgataggacgttttgttccctttgctgccgtagctgctgctaattgcattaatattccattaatgaggcaaagggaactcaaagttggcattcccgtcacggatgagaatgggaaccgcttgggggagtcggcgaacgctgcgaaacaagccatcacgcaagttgtcgtgtccaggattctcatggcagcccctggcatggccatccctccattcattatgaacactttggaaaagaaagcctttttgaagaggttcccatggatgagtgcacccattcaagttgggttagttggcttctgtttggtgtttgctacacccctgtgttgtgccctgtttcctcagaaaagttccatgtctgtgacaagcttggaggccgagttgcaagctaagatccaagagagccatcctgaattgcgacgcgtgtacttcaataagggattgtaaagcagggaggaaacctctgcagctcattctgccactgcaaagctggtgtagccatgctggtgagaaaaatcctgttcaacctgggttctcccagttacggaaaccttttaaagatccacattagccttttagaataaagctgctactttaacagagcacctggcgtgggccaagtgcctgatactcccttacactgaatcatgttatgatttatagaaatacctttcctgtagcttttatagtcattgtttttcaaagacgatataccagccctcacccaggttttaaaaaagcactggtaggcatagaataggtgctcagtatatggtcagtaaatgttctattgattatcaatcagtgaaaaaagaaatctgtttaaaatactgaattttcatctcactcccattgcaaatcaaggagatctcagcagtgaactgggaaaatacaaaagctctgggctaatctataaaaacttaccctgaaatattaagggcagtttgcttctagtttggggattgcgctagcccaatgaaggtgatgaagcttttggatttggagggtaaaagctccttcacaccccttccaaaagtcagtcacagaccactgcaacatgccttccctgctggatcattatatacattcagattgtgagtggattgccttggttgacttttaatttattgttttttgttcttataaagatgataatcttaccttgcagttattgactttatattcaattatttacatcaaataatgaaataactgaaatgtacaaatgtcaaattttggaagtatattcaataccaatgctgtatgagtgggctgaatccagttcattgttttttttttggtaagaagtgagactacagttccagctacctacatgtcttttcttgtcatccttatagatctctttggctttcagaaagatacagtgataatgtgtgtatgaatcagtcacaatgaattttacttgaatattgtatgttgcattccacttcatttgaaaataatgaaaccatgtaccactgtttacatcatctgtagtgatttcatagataatatatttaatatgacagattatgtttcaactctgtagatgtttaacgtcatagacagttggccctctgtatccgtgagctctatatctgtgaattcaaccaagtttggatggaaaatttttttttttttttttttttttttgagacggagtctcgctctgtcacccaggctggagtgcagtggcgtagtctcggctcactgcaagctccgcctcctgggttcacgccgttctcctgcctcagcctctctgagaagctgggactacaggcgcccgccaccacgcccggctaatttttttgtatttttagtagagacggggtttcactgtggtctcgatctcctgacctcgtgatccgcccgccttggcctcccaaggtgctgggattacaagcgtgagccaccgcacccggcctgaaaatattttctaaaaagataaaaaatatacataacgatgaaaaataatacaaatttaaaaaccaatacagtataacaactatttacatagtgcttacattgtattaggtgttataagcaatctagagatgatttagcaagtatacaggaggatgtgcctaggttatatgcaaatactgtgccattttatatcaggaacttgagcatctgcagatattggtatcggagggcggtcctggaaccaagcatccacggatactgaggggtgacatttcatgaagtgtagatcattgtattcagagattgtaaatgaaaaaaatatagaaactatttagttttggtagattttttttctgacaatgtgaccagactgaatttcctcataaagaaaaaatggcgaaaaaaaaaaaaaaaaaaaaaaaaaaaaaaaaaaaaaaaaaaaaaaaaaaaaaaaaaaaaaaaaaaaaaa

SEQ ID NO: 38 - DNA, 4189 bp, Homo sapiens
gcggctgtatttgcggcctgtgcgagtaggcgcttgggcactcagtctccctggcgagcgacgggcagaaatctcgaaccagtggagcgcactcgtaacctggatcccagaaggtcgcgaaggcagtaccgtttcctcagcggcggactgctgcagtaagaatgtcttttccacctcatttgaatcgccctcccatgggaatcccagcactcccaccagggatcccacccccgcagtttccaggatttcctccacctgtacctccagggaccccaatgattcctgtaccaatgagcattatggctcctgctccaactgtcttagtacccactgtgtctatggttggaaagcatttgggcgcaagaaaggatcatccaggcttaaaggctaaagaaaatgatgaaaattgtggtcctactaccactgtttttgttggcaacatttccgagaaagcttcagacatgcttataagacaactcttagctaaatgtggtttggttttgagctggaagagagtacaaggtgcttccggaaagcttcaagccttcggattctgtgagtacaaggagccagaatctaccctccgtgcactcagattattacatgacctgcaaattggagagaaaaagctactcgttaaagttgatgcaaagacaaaggcacagctggatgaatggaaagcaaagaagaaagcttctaatgggaatgcaaggccagaaactgtcactaatgacgatgaagaagccttggatgaagaaacaaagaggagagatcagatgattaaaggggctattgaagttttaattcgtgaatactccagtgagctaaatgccccctcacaggaatctgattctcaccccaggaagaagaagaaggaaaagaaggaggacattttccgcagatttccagtggccccactgatcccttatccactcatcactaaggaggatataaatgctatagaaatggaagaagacaaaagagacctgatatctcgagagatcagcaaattcagagacacacataagaaactggaagaagagaaaggcaaaaaggaaaaagaaagacaggaaattgagaaagagcggagagaaagagagagggagcgtgaaagggaacgagaaaggcgagaacgggaacgagaaagggaaagagaacgtgaacgagaaaaggagaaagaacgggagcgggaacgagaacgggatagggaccgtgaccggacaaaagagagagaccgagatcgggatcgagagagagatcgtgaccgggatagagaaaggagctcagatcgtaataaggatcgcagtcgatcaagagaaaaaagcagagatcgtgaaagggaacgagagcgggaaagagagagagagagagaacgagagcgagaacgagaacgggagcgagagagagagcgagagagggaacgggagcgagaaagagaaaaagacaaaaaacgggaccgagaagaagatgaagaagatgcatacgaacgaagaaaacttgaaagaaaactccgagagaaagaagctgcttatcaagagcgccttaagaattgggaaatcagagaacgaaagaaaacccgggaatatgagaaagaagctgaaagagaagaagaaagaagaagagaaatggccaaagaagctaaacgactaaaagaattcttagaagactatgatgatgatagagatgaccccaaatattacagaggaagtgctcttcagaaaaggttgcgtgatagagaaaaggaaatggaagcagatgaacgagataggaagagagagaaggaggagcttgaggaaatcaggcagcgccttctggcagaagggcatccagatccagatgcagagctccagaggatggaacaagaggctgagaggcgcaggcagccacaaataaagcaagagccagaatcagaagaggaggaagaagaaaagcaagaaaaagaagaaaaacgagaagaacccatggaagaggaagaggaaccagagcaaaagccttgtctgaaacctactctgaggcccatcagctctgctccatctgtttcctctgccagtggcaatgcaacacctaacactcctggggatgagtctccctgtggtattattattcctcatgaaaactcaccagatcaacagcaacctgaggagcataggccaaaaataggactaagtcttaaactgggtgcttccaatagtcctggtcagcctaattctgtgaagagaaagaaactacctgtagatagtgtctttaacaaatttgaggatgaagacagtgatgacgtaccccgaaaaaggaaactggttcccttggattatggtgaagatgataaaaatgcaaccaaaggcactgtaaacactgaagaaaagcgtaaacacattaagagtctcattgagaaaatccctacagccaaacctgagctcttcgcttatcccctggattggtctattgtggattctatactgatggaacgtcgaattagaccatggattaataagaaaatcatagaatatataggtgaagaagaagctacattagttgattttgtttgttctaaggttatggctcatagttcaccccagagcattttagatgatgttgccatggtacttgatgaagaagcagaagtttttatagtcaaaatgtggagattattgatatatgaaacagaagccaagaaaattggtcttgtgaagtaaaactttttatatttagagttccatttcagatttcttctttgccacccttttaaggactttgaatttttctttgtctttgaagacattgtgagatctgtaattttttttttttgtagaaaatgtgaattttttggtcctctaatttgttgttgccctgtgtactcccttggttgtaaagtcatctgaatccttggttctctttatactcaccaggtacaaattactggtatgttttataagccgcagctactgtacacagcctatctgatataatcttgttctgctgatttgtttcttgtaaatattaaaacgactccccaattattttgcagaattgcacttaatattgaaatgtactgtataggaaccaacatgaacaattttaattgaaaacaccagtcataaactattaccacccccactctcttttgatcagaaatggcaagcccttgtgaaggcatggagtttaaaattggaatgcaaaaattagcagacaatccattcctactgtatttctgtatgaatgtgtttgtgaatgtatgtgtaaaagtctttcttttccctaatttgctttggtggggtccttaaaacatttcccaactaaagaatagaattgtaaaggaaaagtggtactgttccaacctgaaatgtctgttataattaggttattagtttcccagagcatggtgttctcgtgtcgtgagcaatgtggtttgctaactggatggggttttcttattaataagatggctgcttcagcttctcttttaaaggaatgtggatcatagtgatttttccttttaattttattgctcagaaatgaggcatatcctaaaaatcctggagagctgtatttaatgcatttttgcactaattggtccttagtttaattctattgtatctgtttatttaacaaaaaattcatcataccaaaaagtgtaagtgaaaaccccctttaaaacaaaacaaaaaaatgaaataaaattaggcaaattgacagacagtgagagttttacaaacatgataggtattctgctcggcaatttgtaagtttacatgttatttaaggataaaggtaaatcattcaaggcagttaccaaccactaactatttgttttcatttttgtcttgtagaaggtttatatcttgttttaccttggctcattagtgtttaaaaatgtactgatgatgtgcttagagaaattcctggggctttcttcgttgtagatcagaatttcaccagggagtaaaattacctgaaaacgcaagaagttttaaacagcttttcacacaaattagatgcaactgttcccatgtctgagtacttatttaaaagaaaggtaaagattggcctgttagaaaaagcataatgtgagctttggattactggatttttttttttttaaacacacctggagaggacatttgaaaacactgttcttaccctcgaaccctgatgtggttccattatgtaaataaaaaaaaaaaaaaaaaaa

SEQ ID NO: 39 - DNA, 10188 bp, Homo sapiens
atgagaaggaaaaactcttactatgtgtggcaaaaaatttttcaaattcagtttcccttatatactgcttacaagcataatactcaccctactattgaggatatatcaactcaagaaagtaacatattaggggcattctgtgatatgaatgatgtagaagtaccattgcatttgcttcgttatgtatgtttgttttgtgggaaaaatggcctttctctcatgaaggattgctttgaatatggaactcctgaaactttgccatttcttatagcacatgcgtttattacagttgtgtctaatattagaatatggctacatattcccgctgtcatgcagcacattataccttttaggacctatgttattaggtatttatgcaagctctcggatcaggagttacgacagagtgcagctcgtaacatggctgacttaatgtggagcacagtcaaagaaccattggatacaacattatgctttgataaagaaagcctagatcttgcatttaagtactttatgtcacctactttgactatgaggttggctggattgagtcagataacaaatcaactccataccttcaatgatgtgtgcaataatgaatcattagtatcggacacagaaacgtccattgcaaaagaacttgcagactggcttattagcaacaatgtggtggagcatatatttggaccaaatttacatattgagattatcaaacagtgccaagtgattttgaattttttggcagcagaagggcgactgagtactcaacatattgactgtatttgggctgcagcacagttgaaacattgtagtcggtatatacatgacttatttccttcactcatcaagaatttggatcccgtaccacttagacatctacttaatctggtctcagctcttgagccaagtgttcatactgaacagacactgtacttggcatccatgttaattaaagcactgtggaataacgcactagcagctaaggctcagttatctaaacagagttcttttgcatctttattaaatactaatattcccattggaaataagaaagaggaagaagagcttagaagaacagctccatcaccttggtcacctgcagctagtcctcaaagcagtgataatagcgatacacatcaaagtggaggtagtgacattgaaatggatgagcaacttattaatagaaccaaacatgtgcaacaacgactttcagacacagaggaatccatgcagggaagttctgacgaaactgccaacagtggtgaagatggaagcagtggtcctggtagcagtagtgggcatagtgatggatctagcaatgaggttaattctagccacgcaagccagtcagctgggagccctggcagtgaggtacagtcagaagacattgcagatattgaagccctcaaagaggaagatgaagacgatgatcatggtcataatcctcccaaaagcagttgtggtacagatcttcggaatagaaagttagagagtcaagcaggcatttgcctgggggactcccaaggcacgtcagaaagaaatgggacaagcagcggaacaggaaaggacctggtttttaacactgaatcattgccatcagtagataatcgaatgcgaatgctggatgcttgttcacactctgaagacccagaacatgatatttcaggggaaatgaatgctactcatatagcacaagggtctcaggagtcttgtatcacacgaactggggacttccttggggagactattgggaatgaattatttaattgtcgacaatttattggtccacagcatcaccaccaccaccaccaccatcaccaccaccacgatgggcatatggttgatgatatgctaagtgcagatgatgtcagttgtagtagctcccaggttagtgcaaaatcagaaaaaaatatggctgattttgatggtgaagaatctggatgtgaagaggagctagttcagattaattcacatgcggaactgacatctcacctccaacaacatcttcccaatttagcttccatttaccatgaacatcttagtcaaggacctgtagttcataaacatcaattcaacagtaatgctgttacagacattaatttggataatgtttgcaagaaaggaaatactttgttgtgggatatagtccaagatgaagatgcagttaatctttctgaaggattaataaatgaagcagagaaacttctttgttcgttagtatgttggtttacagatagacaaattcgaatgagattcattgaaggttgccttgaaaacttgggaaacaacagatcagtagtaatttcacttcgtcttcttccaaaactatttggtacttttcagcagtttgggagcagttacgatacacactggataacaatgtgggcagaaaaagaactgaacatgatgaagcttttctttgataatttggtatactacattcaaactgtgagagaaggaagacaaaaacatgcactgtacagccatagtgctgaagttcaagttcgtcttcaattcttgacttgtgtattttcaactctgggatcacctgatcatttcaggttaagtttagagcaagttgacatcttatggcattgtttagtagaagattctgaatgttatgatgatgcactccattggtttttaaatcaagttcgaagtaaagatcaacatgctatgggtatggaaacctacaaacatcttttcctggagaagatgccccagctaaaacctgaaacaattagcatgactggcttaaacctgtttcagcatctctgtaacttggctcgattggctaccagtgcctatgatggttgttcaaattctgagctgtgtggtatggaccaattttggggcattgctttaagagcacaatctggtgatgtcagtcgagcagctatccagtatattaactcctattatattaatggtaaaacaggtttggagaaggagcaagaatttattagtaagtgcatggagagtcttatgatagcttctagcagtcttgaacaggaatcacactcaagtctcatggttatagaaagaggactccttatgctgaagacacatctggaagcgtttaggagaaggtttgcatatcatctgagacagtggcaaattgaaggcactggtattagtagtcatttgaaagcactgagtgacaaacagtctctgccgctaagggttgtatgccagccagctggacttcctgacaagatgactattgaaatgtatcctagtgaccaggtagcagatcttagggctgaagtaactcattggtatgaaaatttacagaaagaacaaataaatcaacaagctcagcttcaggagtttggtcaaagcaaccgaaaaggagagtttcctggaggcctcatgggacctgtcaggatgatttcatctggacacgagttaacaacagattatgatgaaaaagcacttcatgagcttggttttaaggatatgcagatggtatttgtatctttgggtgcaccaaggagagagcggaaaggggaaggtgttcagctgccagcatcttgcctcccaccccctcagaaggacaacattccaatgcttttgcttttacaagagcctcatttaactactctttttgatttattagagatgcttgcatcatttaaaccaccctcaggaaaagtggcagtggatgatagtgagagcttacgatgtgaagaacttcatcttcatgcagaaaatctgtctaggcgggtctgggagctactgatgcttcttcctacatgtcctaatatgttgatggcattccagaatatctcagatgagcagagtaatgatggatttaattggaaagaacttctcaaaattaagagcgcccacaagctattgtatgctctggaaattattgaagcactgggaaaacctaatagaagaataaggagggagtctacgggaagttacagtgatctttatccagattcagatgattcaagtgaggatcaagtggaaaatagtaaaaattcctggagttgcaagtttgttgctgctggagggcttcaacagttattagaaatttttaattctggaattctagagcctaaagagcaggaatcatggactgtgtggcagctagactgtcttgcttgcttgctgaagttaatatgccagtttgcagtagatccatccgatttggatttagcttatcatgatgtctttgcctggtctggtatagcggaaagccataggaaaagaacctggcctggcaaatcaaggaaggctgctggtgatcatgctaagggtcttcatataccacgattaacagaggtatttcttgttcttgtccaaggaaccagtttgattcagcgacttatgtctgttgcttatacgtatgataatctggctcctagagttttaaaagctcagtctgatcacaggtctagacatgaagtttcacattattcaatgtggctcttggtgagttgggctcattgctgttctttagtgaaatctagccttgctgatagcgatcatttacaagattggctaaagaaattgactctccttattcctgagactgcagttcgtcatgaatcatgcagtggtctctataagttatccctgtcagggctggatggaggagactcaatcaatcgttcttttctgctattggctgcctcaacattattgaaatttcttcctgatgctcaagcactcaaacctattaggatagatgattatgaggaagaaccaatattaaaaccaggatgtaaagagtatttttggttgttatgcaaattagttgacaacatacatataaaggacgctagtcagacaacgctcctcgacttagatgccttggcaagacatttggctgactgtattcgaagtagggagatccttgatcatcaggatggtaatgtagaagatgatgggcttacaggactcctaaggcttgcaacaagtgttgttaaacacaaaccaccctttaaattttcaagggaaggacaggaatttttgagagatatcttcaatctcctgtttttgttgccaagtctaaaggaccgacaacagccaaagtgcaaatcacattcttcaagagctgccgcttacgatttgttagtagagatggtaaaggggtctgttgagaactacaggctaatacacaactgggttatggcacaacacatgcagtcccatgcaccttataaatgggattactggcctcatgaagatgtccgtgctgaatgtagatttgttggccttactaaccttggagctacttgttacttagcttctactattcagcaactttatatgatacctgaggcaagacaggctgtcttcactgccaagtattcagaggatatgaagcacaagaccactcttctggagcttcagaaaatgtttacatatttaatggagagtgaatgcaaagcatataatcctagacctttctgtaaaacatacaccatggataagcagcctctgaatactggggaacagaaagatatgacagagttttttactgatctaattaccaaaatcgaagaaatgtctcccgaactgaaaaataccgtcaaaagtttatttggaggtgtaattacaaacaatgttgtatccttggattgtgaacatgttagtcaaactgctgaagagttttatactgtgaggtgccaagtggctgatatgaagaacatttatgaatctcttgatgaagttactataaaagacactttggaaggtgataacatgtatacttgttctcattgtgggaagaaagtacgagctgaaaaaagggcatgttttaagaaattgcctcgcattttgagtttcaatactatgagatacacatttaatatggtcacgatgatgaaagagaaagtgaatacacacttttccttcccattacgtttggacatgacgccctatacagaagattttcttatgggaaagagtgagaggaaagaaggttttaaagaagtcagtgatcattcaaaagactcagagagctatgaatatgacttgataggagtgactgttcacacaggaacggcagatggtggacactattatagctttatcagagatatagtaaatccccatgcttataaaaacaataaatggtatctttttaatgatgctgaggtaaaaccttttgattctgctcaacttgcatctgaatgttttggtggagagatgacgaccaagacctatgattctgttacagataaatttatggacttctcttttgaaaagacacacagtgcatatatgctgttttacaaacgcatggaaccagaggaagaaaatggcagagaatacaaatttgatgtttcgtcagagttactagagtggatttggcatgataacatgcagtttcttcaagacaaaaacatttttgaacatacatattttggatttatgtggcaattgtgtagttgtattcccagtacattaccagatcctaaagctgtgtccttaatgacagcaaagttaagcacttcctttgtcctagagacatttattcattctaaagaaaagcccacgatgcttcagtggattgaactgttgacgaaacagtttaataatagtcaggcagcttgtgagtggtttttagatcgtatggctgatgacgactggtggccaatgcagatactaattaagtgccctaatcaaattgtgagacagatgtttcagcgtttgtgtatccatgtgattcagaggctgagacctgtgcatgctcatctctatttgcagccaggaatggaagatgggtcagatgatatggatacctcagtagaagatattggtggtcgttcatgtgtcactcgctttgtgagaaccctgttattaattatggaacatggtgtaaaacctcacagtaaacatcttacagagtattttgccttcctttacgaatttgcaaaaatgggtgaagaagagagccaatttttgctttcattgcaagctatatctacaatggtacatttttacatgggaacaaaaggacctgaaaatcctcaagttgaagtgttatcagaggaagaaggggaagaagaagaggaggaagaagatatcctctctctggcagaagaaaaatacaggccagctgcccttgaaaagatgatagctttagttgctcttttggttgaacagtctcgatcagaaaggcatttgacattatcacagactgacatggcagcattaacaggaggaaagggatttcccttcttgtttcaacatattcgtgatggcatcaatataagacaaacttgtaatctgattttcagcctgtgtcgatacaataatcgacttgcagaacatattgtatctatgcttttcacatcaatagcaaagttgactcctgaggcagccaatcctttctttaagttgttgactatgctaatggagtttgctggtggacctccaggaatgcctccctttgcatcttatattctgcagaggatatgggaggtgattgaatacaatccttctcagtgtctagattggttggcagtgcagacaccccgaaataaactggcacacagctgggtcttacagaatatggaaaactgggtcgagcggtttcttttggctcacaattatcctagagtgaggacttctgcagcttatcttctggtgtcccttataccaagcaattcattccgtcagatgttccggtcaacaaggtctttgcacatcccaacccgtgaccttccactcagtccagacacaacagtagtcctacatcaggtctacaacgtgctccttggtttgctctcaagagccaaactttatgttgatgctgctgttcatggcactacaaagctagtgccctattttagctttatgacttactgtttaatttccaaaactgagaagctgatgttttccacatatttcatggatttgtggaaccttttccagcctaaactttctgagccagcaatagctacaaatcacaataaacaggctttgctttcattttggtacaatgtctgtgctgactgtccagagaatatccgccttattgttcagaacccagtggtaaccaagaacattgccttcaattacatccttgctgaccatgatgatcaggatgtggtgctttttaaccgtgggatgctgccagcgtactatggcattctgaggctctgctgtgagcagtctcctgcattcacacgacaactggcttctcaccagaacatccagtgggcctttaagaatcttacaccacatgccagccaataccctggagcagtagaagaactgtttaacctgatgcagctgtttatagctcagaggccagatatgagagaagaagaattagaagatattaaacagttcaagaaaacaaccataagttgttacttacgttgcttagatggccgctcctgctggactactttaataagtgccttcagaatactattagaatctgatgaagacagacttcttgttgtatttaatcgaggattgattctaatgacagagtctttcaacactttgcacatgatgtatcacgaagctacagcttgccatgtgactggagatttagtagaacttctgtcaatatttctttcggttttgaagtctacacgcccttatcttcagagaaaagatgtgaaacaagcattaatccagtggcaggagcgaattgaatttgcccataaactgttaactcttcttaattcctatagtcctccagaacttagaaatgcctgtatagatgtcctcaaggaacttgtacttttgagtccccatgattttcttcatactctggttccctttctacaacacaaccattgtacttaccatcacagtaatataccaatgtctcttggaccttatttcccttgtcgagaaaatatcaagctaataggagggaaaagcaatattcggcctccgcgccctgaactcaatatgtgcctcttgcccacaatggtggaaaccagtaagggcaaagatgacgtttatgatcgtatgctgctagactacttcttttcttatcatcagttcatccatctattatgccgagttgcaatcaactgtgaaaaatttactgaaacattagttaagctgagtgtcctagttgcctatgaaggtttgccacttcatcttgcactgttccccaaactttggactgagctatgccagactcagtctgctatgtcaaaaaactgcatcaagcttttgtgtgaagatcctgttttcgcagaatatattaaatgtatcctaatggatgaaagaacttttttaaacaacaacattgtctacacgttcatgacacatttccttctaaaggttcaaagtcaagtgttttctgaagcaaactgtgccaatttgatcagcactcttattacaaacttgataagccagtatcagaacctacagtctgatttctccaaccgagttgaaatttccaaagcaagtgcttctttaaatggggacctgagggcactcgctttgctcctgtcagtacacactcccaaacagttaaacccagctctaattccaactctgcaagagcttttaagcaaatgcaggacttgtctgcaacagagaaactcactccaagagcaagaagccaaagaaagaaaaactaaagatgatgaaggagcaactcccattaaaaggcggcgtgttagcagtgatgaggagcacactgtagacagctgcatcagtgacatgaaaacagaaaccagggaggtcctgaccccaacgagcacttctgacaatgagaccagagactcctcaattattgatccaggaactgagcaagatcttccttcccctgaaaatagttctgttaaagaataccgaatggaagttccatcttcgttttcagaagacatgtcaaatatcaggtcacagcatgcagaagaacagtccaacaatggtagatatgacgattgtaaagaatttaaagacctccactgttccaaggattctaccctagctgaggaagaatctgagttcccttctacttctatctctgcagttctgtctgacttagctgacttgagaagctgtgatggccaagctttgccctcccaggaccctgaggttgctttatctctcagttgtggccattccagaggactctttagtcatatgcagcaacatgacattttagataccctgtgtaggaccattgaatctacaatccatgtcgtcacaaggatatctggcaaaggaaaccaagctgcttcttga

SEQ ID NO: 40 - DNA, 4210 bp, Homo sapiens
atggcggccggcaagagcggcggtagcgcaggggagattacttttctggaagctttggctagatcagagtctaagagagatggaggttttaaaaataattggagctttgatcatgaagaagaaagtgaaggagatacagataaagatgggacaaatctgctcagtgtggatgaagatgaggattctgaaacctcaaaaggaaaaaagttaaatcgtcgatctgaaattgttgctaatagctctggtgaattcatcttgaagacatatgtaagacgaaacaagtctgaaagttttaaaactttgaaaggcaacccaattggacttaacatgttgagcaacaataagaaattgagtgaaaatatgcaaaatacgtcattatgttctggaactgtagttcatggtagacgttttcatcatgctcatgcacagataccagtagtaaaaacagcagcccaaagcagtctggaccgaaaagaaaggaaagaatacccacctcatgtccaaaaagttgaaattaatcctgtaaggttaagtcggctccaaggtgttgaacgtataatgaagaaaacagaagagtccgaatcacaagtggagcctgaaattaagaggaaagtacaacagaaacggcactgtagtacctatcagcctactcctcctctatctcctgcttcaaaaaaatgtttaacccatttagaggatttgcaaagaaattgcagacaagctattactttgaatgagtctactggaccattattaagaacgtcaattcatcagaattctggaggacagaagtcacaaaacacaggattaacaaccaagaagttttatggcaacaatgtggaaaaggttccaattgatattattgtgaattgtgatgacagtaaacacacttatttacagactaatggaaaagtcattttacctggggcaaaaatacccaaaatcacaaacttgaaagaaaggaaaacaagtttgtcagacctaaatgatccaatcattttgtccagtgatgatgatgatgacaacgacagaactaacagaagagaaagcatatctcctcagcctgctgattcagcatgttcttcccctgcaccatccactggaaaagtagaagcagcactaaatgaaaatacttgcagagcagagcgtgaactacgaagcattccagaagactcagagttaaatacagttacattgccaagaaaagcaagaatgaaagaccagtttggcaattctattatcaacacacctctgaaacgtcgtaaagtgttttctcaagaacctccagatgctttagctttaagctgccaaagttcctttgacagtgtcattttaaactgtcgaagtatacgagtaggaacactcttccggctgttaatagagcctgtaattttttgtttagattttatcaagatacagctagacgaaccagaccatgatcctgtagagattatattaaatacctctgatctaactaaatgtgaatggtgtaatgtccgaaaattacctgtagtgtttcttcaagcaattccagcagtttatcaaaagctgagcatccaactgcaaatgaataaggaggataaagtttggaatgattgtaaaggagtaaataaattaacaaatttagaagaacaatatataattttaatttttcaaaatggccttgatcctccggcaaatatggtatttgaaagtatcattaatgaaattggtataaagaataacatctccaatttttttgcgaaaattccctttgaagaagctaatggcagacttgttgcctgtacaagaacctatgaagagagcatcaaaggaagttgtgggcaaaaggaaaacaaaattaaaactgtatcatttgaatctaaaatacaacttagaagcaaacaagaatttcagttttttgatgaagaagaagaaactggagaaaaccacaccatcttcattggcccagtagaaaagttgatagtatatccaccacctccagctaagggaggcatctctgttaccaatgaggacctgcactgtctaaatgaaggagaatttttaaatgatgttattatagacttttatttgaaatacttggtgcttgaaaaactgaagaaggaagacgctgaccgaattcatatattcagttcttttttctataaacgccttaatcagagagagaggagaaatcatgaaacaactaatctgtcaatacagcaaaaacggcatgggagagtaaaaacatggacccggcacgtagatatttttgagaaggattttatttttgtaccccttaatgaagctgcacactggtttttggctgttgtttgtttccccggtttggaaaaaccaaagtatgaacctaatcctcattaccatgaaaatgctgtcatacagaaatgttcaactgtagaggacagttgtatttcttcttcagccagtgaaatggagagttgttcacaaaactcttctgccaagcctgtaattaagaagatgctaaacaaaaaacattgcatagctgtaattgattccaatcctgggcaggaagaaagtgaccctcgttataagagaaacatatgcagtgtaaaatacagtgtgaaaaaaataaatcatactgcgagtgaaaatgaagaattcaataaaggagaatctacatcccagaaagttgctgataggactaaaagtgagaatggcctacagaatgaaagtttaagttccacacatcatacagatggcttaagcaaaatcagactaaactatagcgatgaatcacctgaagctggtaaaatgcttgaagatgaactcgtcgacttctcagaagatcaggataaccaggatgatagcagtgacgatggattcctcgctgatgacaactgcagttcagaaataggacagtggcatttaaagcctactatctgtaaacaaccttgtatcctacttatggactcactccgaggcccttctcggtcaaatgttgtcaaaattttaagagagtatttagaagtggaatgggaagttaaaaaaggaagcaaaagaagtttttccaaagatgttatgaagggctctaatccaaaagtaccacagcaaaacaacttcagtgactgtggtgtatatgtattgcagtatgtagagagcttttttgagaatccaattctcagttttgaactacctatgaatttggcaaactggtttcctccaccaagaatgagaacaaaaagagaagaaatccgaaacataattctgaagctacaggaagatcagagcaaagagaaaagaaagcataaggacacttactcaacagaagcacctttaggcgaaggaacagaacaatgtgtcaatagtatctcagattgaccatttctgttacttgtcatttctactttcagaaactaaatgactttcaaatttgggtatagacaataaagaactgaagtgctcactactcagtgatttggaaattttgatgcttgtataaatgtcagataattaatttccaaaggcgtatgtattaagtaaaagtctgtaaatatgttaatgaggccaatttttccagcatttataattatttttttcacttgttaggaagcttttgttatgtattttctgttaatagtacctaaaattgcaacttctaaacccaaataaaaagaaaatatttataggaggaaatgattaatttgatattctttagtgaacttgtttaattcctcagtgggtgtgacatatttcatgggaatattcaaatatctatggtaatattttgaccctttatatttgttctaaaataagtcaaaatgtgaaaataatattaaatctaagatattttgaactaagcatctttatatgcttgtgtaacaggaacaaagtaacagcctttcaattcatatactgccttgtgttcagtgaacccaagaaatgtaataaatatttgtaattttacacaaatatttaagaggaaagagtattaagagcaattcaaaaaaagtaaccttatactactaaaaaaaaaattcttgcatatattatcatcaaatgcatttttgaagacatcaaagactcaggttaaaactattttggtaagtgcagcttgaatttcaaatatcccgtgttacctttctctattacagcttaaagtatgctacaatctgtgtcatatagttaattgataagcatttttaatctgtgtaaacacaggaatttaaataggaatttactatttttttat

SEQ ID NO: 41 - DNA, 3071 bp, Homo sapiens
ccgccattttgtgagaagcaaggtggcctccacgtttcctgagcgtcttcttcgcttttgcctcgaccgccccttgaccacagacatgtctcgggatcggttccggagtcgtggcggtggcggtggtggcttccacaggcgtggaggaggcggcggccgcggcggcctccacgacttccgttctccgccgcccggcatgggcctcaatcagaatcgcggccccatgggtcctggcccgggccagagcggccctaagcctccgatcccgccaccgcctccacaccaacagcagcaacagccaccaccgcagcagccaccgccgcagcagccgccaccgcatcagccgccgccgcatccacagccgcatcagcagcagcagccgccgccaccgccgcaggactcttccaagcccgtcgttgctcagggacccggccccgctcccggagtaggcagcgcaccaccagcctccagctcggccccgcccgccactccaccaacctcgggggccccgccagggtccgggccaggcccgactccgaccccgccgcctgcagtcacctcggcccctcccggggcgccgccacccaccccgccaagcagcggggtccctaccacacctcctcaggccggaggcccgccgcctccgcccgcggcagtcccgggcccgggtccagggcctaagcagggcccaggtccgggtggtcccaaaggcggcaaaatgcctggcgggccgaagccaggtggcggcccgggcctaagtacgcctggcggccaccccaagccgccgcatcgaggcggcggggagccccgcgggggccgccagcaccacccgccctaccaccagcagcatcaccaggggcccccgcccggcgggcccggcggccgcagcgaggagaagatctcggactcggaggggtttaaagccaatttgtctctcttgaggaggcctggagagaaaacttacacacagcgatgtcggttgtttgttgggaatctacctgctgatatcacggaggatgaattcaaaagactatttgctaaatatggagaaccaggagaagtttttatcaacaaaggcaaaggattcggatttattaagcttgaatctagagctttggctgaaattgccaaagccgaactggatgatacacccatgagaggtagacagcttcgagttcgctttgccacacatgctgctgccctttctgttcgtaatctttcaccttatgtttccaatgaactgttggaagaagcctttagccaatttggtcctattgaaagggctgttgtaatagtggatgatcgtggaagatctacagggaaaggcattgttgaatttgcttctaagccagcagcaagaaaggcatttgaacgatgcagtgaaggtgttttcttactgacgacaactcctcgtccagtcattgtggaaccacttgaacaactagatgatgaagatggtcttcctgaaaaacttgcccagaagaatccaatgtatcaaaaggagagagaaacccctcctcgttttgcccagcatggcacgtttgagtacgaatattctcagcgatggaagtctttggatgaaatggaaaaacagcaaagggaacaagttgaaaaaaacatgaaagatgcaaaagacaaattggaaagtgaaatggaagatgcctatcatgaacatcaggcaaatcttttgcgccaagatctgatgagacgacaggaagaattaagacgcatggaagaacttcacaatcaagaaatgcagaaacgtaaagaaatgcaattgaggcaagaggaggaacgacgtagaagagaggaagagatgatgattcgtcaacgtgagatggaagaacaaatgaggcgccaaagagaggaaagttacagccgaatgggctacatggatccacgggaaagagacatgcgaatgggtggcggaggagcaatgaacatgggagatccctatggttcaggaggccagaaatttccacctctaggaggtggtggtggcataggttatgaagctaatcctggcgttccaccagcaaccatgagtggttccatgatgggaagtgacatgcgtactgagcgctttgggcagggaggtgcggggcctgtgggtggacagggtcctagaggaatggggcctggaactccagcaggatatggtagagggagagaagagtacgaaggcccaaacaaaaaaccccgattttagatgtgatatttaggctttcattccagtttgttttgtttttttgtttagataccaatcttttaaattcttgcattttagtaagaaagctatctttttatggatgttagcagtttattgacctaatatttgtaaatggtctgtttgggcaggtaaaattatgtaatgcagtgtttggaacaggagaatttttttttcctttttatttctttattttttcttttttactgtataatgtccctcaagtttatggcagtgtaccttgtgccactgaatttccaaagtgtaccaatttttttttttttactgtgcttcaaataaatagaaaaatagttataatattggatcttcaactttgccattcatgcttctatgcatattaggctacgtattccacattgaaagcatgagagtgtctaggcctttgaatggcatatgccatttctgggaaatgcatctggaggctaagtattgctttctacaaataattgccccctttgttttaaaaagaagaaatgcatattgaagtagtttgatgatttgtttggcatataggaagcacgctggtgctaagtattttttaaatggttatgtaagcaaagctgaactgtaaatcttcaggaatatgtattaagattgtggaatgggtgtaagacaattggtagggggtgaaagtgggtttgattaaatggatcttttatggccctatgatctatcctttacttgaaagcttttgaaaagtggaaaggtcattttgttgcatttccccatttcttgtttttaaaagaccaacaaatctcaagccctataaatggcttgtattgaacttttacatttgaattaaagatgttaaacatgaaaaaaa

SEQ ID NO: 42 - DNA, 4493 bp, Homo sapiens
atcgtctgccgctttggtgacttctgacagctctctccatggaaggaggcggcggccgcgatgagccttcagcctgccgggcaggggacgtgaacatggatgaccctaagaaggaagacattcttcttttggccgatgaaaaatttgacttcgatctttcattgtcttcttcgagtgcaaatgaagatgatgaagtcttcttcggaccctttggacataaagaaagatgtattgctgccagcttggaattaaataatccggttcccgaacagcctccgttgcccacatctgagagtccctttgcctggagccctctggccggggagaagttcgtggaggtgtacaaagaagctcacttactggctttacacattgagagcagcagccggaaccaggcagcccaagctgccaagcctgaagaccctcggagccagggcgtggaaagattcatacaggagtcaaaattaaaaataaacctctttgagaaagaaaaggaaatgaagaaaagccccacgtctcttaaaagggagacatactacctgtcagacagccccttgctggggccccctgtgggtgagcctcggctcttggcctcctccccggccctgcccagctctggtgcccaggcccgcctcacccgggcgccggggcctccgcactctgctcatgctttgcccagggaatcatgcactgctcatgctgcaagtcaggcagcgactcagaggaagcccgggaccaaattgctgctgcctcgagcggcctctgttagaggaagaagcatccctggggctgcggagaagcccaagaaagagattccagctagtccttccaggacaaaaatcccagctgagaaggaatcccaccgggatgttctccctgacaaacctgccccgggtgctgtcaatgtgccggccgccggaagccacttgggccagggcaagcgggcgatccctgttccaaacaagttggggctgaagaagaccctgttaaaagcacccggctctaccagcaatctcgcaaggaagtcctcctcggggcctgtttggagcggggcatccagtgcgtgcacatccccagcagtgggcaaagctaaatcaagtgaatttgcaagtattcctgcaaatagctcccggcctctgtcaaacatcagcaagtcaggcagaatgggacccgccatgctgcggccagctctgcctgcaggccctgtgggggcatcctcctggcaggccaagcgggtcgatgtttctgagctggcagcggagcagctcacggcacccccctcagcatcccccacccaaccccagactccggaaggtggcggccagtggctgaactccagttgcgcttggtcagaatcttctcaattgaataagactagaagtatcagacggcgagattcctgtctaaattccaagacaaaggttatgcctactcctacaaatcaatttaaaattcctaagttttctattggtgactccccggacagctcaacaccaaagctttcgcgggcacagcggccgcagtcgtgcacgtcagttggcagggtcactgtccacagcaccccggttagacgctcatctgggccagcaccacaaagcctgctgagcgcacggcgtgtgtcagccttgcccacacccgccagccggcgctgctctggccttccaccgatgacccccaaaacgatgcccagggccgtgggctctcccctgtgtgtgccagctcggagacgttcctctgagccccgcaagaactctgcaatgagaactgaaccaacaagggagagcaacagaaagacagattccaggctggtggatgtgtcccctgacaggggttctcctccttcccgtgtgcctcaggcacttaacttttctccagaggaaagcgattctactttctccaaaagtactgccacagaagtagctcgggaggaagccaagccgggtggagatgcagcccctagtgaggctcttcttgtagatatcaaactggaaccactcgcggtcactccagatgctgcaagccagcccctcattgaccttcctctcatcgacttctgcgataccccagaagcacacgtggctgtaggatctgaaagcaggcctctgatcgacctcatgacaaacactccagacatgaataaaaatgtggccaaaccttcaccggtggtgggacagctcatagacctgagctcccctctgatccagctgagccctgaggctgacaaggagaacgtggattccccactcctcaagttctaagccgaaccaaatcctttgccttgaaagaacagccctaaagtggttttcaaccctcagaaacaagctttaggctggtcgcagtggcttacacttgtaaccctagaacttgggaggctgaggtgggcggattacttgagcccaggagttcgggaccagcctgggaaatatagtgaaactcctgtccctacaaaaaatacaaaaattagccgggtgtggtagtgcatgcctgtagtcccagctacttgggaggctgaagtgggaggatggcctgagctcaaggagatgcaggctgcagtgggctgtgattgtgccactgcactccagcctgggcaccaatgtgagaacctgtcttggaaaaaaaaaaaaagaaacatgttttagtagaagttttatttgaaaaagaaaaataagcataaatatattcccagtgctggagagggtgggctgagggactggggccagcacggaccacccaaggcctctgcttcccgccgccaccctcctcgctgccattctctgggctggaatgtgaagcctcagtcactctaaatgaagaattttcttttgaatgttttgtatgtaaaatagcaagtggctatttttaaagttaagtttgtataaatagttagatattctagatttacattaaattgtaaaataaatggacttattgaagcatatcttgatttttaagcttatcttgattttcaaacatgcatagctatttttatcactctaatcagtaaggctactatctagactcgaatgctttcatacaagtgattttcaaaaattagtcaataaaaattgatgtcagtgcaggcccaggcccgcccccagatacactagtttctaggtctggggccagcctagtaattgttactaggcacacaggtgatgctgactcgatggcctgagacacaccccttgagaagaagctgctctggggagacgagggtatgagtggaaagaggatgggcgaggaggccgggcttacctggacactaaggtgatggacggcgtctgctgggcaggcctcggggaggacccctcagctttgctctcagcaggggcccgacaagctcagtgggcagtggcaggaactgagtgccactggaaagcccattccctttatttagaaaacgagctccaggaagccgctactttgtgtccatttctcttgaggaaacttaccaccttggttgagcggcttcatggcagacagcagcgagccagcggccggactctgtatttcggaccccactccagtgctccctgggtcataccaggatctgcctctgtccacaaagatgagggaaaatgatgactgtgctgtgctctctacttcctgcggttactgcgtgattctaaagctgccactcggaacagcgagtcctctgccgtcgagagcagggaggggtagggtggacaggcgatgccgtggaaagacgtctcggtggaaactgccatggtggaaaggtggcgcgcttctcacggctgagttgctgcgcctgcagacggaagctccccacaggcagagctgcttggatgtgtgagtcatgaagccagagaagccccgctccatgagcagtgactccccaggccctgtgacctccctcctgtcttgcagctcctcctggcaccagtccccagggctctcctgttggtagttcctgcttttcttcttggaaattcctcgtggacctcgagatctttaccctaaaatagttctgttgaatttcaccctggcaatgtaaattgatagcttatcttcacagatgccagacaatggacaactcaccatcagtcctctgctcacctgagacaaatgcatgtctgattgcttcctctgccctattgtttatgtgaaaatgcagattcactgagccagactaaggcatcagtgactgttcctctacctgcctctcacatggagattgtgtattcagtgaaaggctgatcaaagacccaaaggaatgcaacagtttatctcttatctacctatgacctgcgagctgcccaccacccccagttgttgcgcctttccagacagaaccagtgtacatcttacacgtattaattgatgtcctgtgtctccctaatatgtatcaaagcaagctgtgcctcgaccaccttgggcacatatcctcaggacatcatcctgaggctgtgtcactggcatgtccttaaccttggcaaaataaactttctaaattgaaaaaaaaaaaaaaaaaa

SEQ ID NO: 43 - DNA, 1684 bp, Homo sapiens; identical to SEQ ID NO: 24

SEQ ID NO: 44 - DNA, 4996 bp, Homo sapiens
agtgctcgcccgcccgaccccggcggctcgcgcccgggagcgccgcagggtcgctagagtcggccgcgtcctttgtgtggcgctcaggctgcgccgcggggcggcgggacggaatgtgggcgctgcgggggcttttctctcctacccgaactgtgggaacaatggactgaaaggggaagatggattgaggggccgagcggggaagcgagctgcaccggggaatcatgacttctgcagccgagataaagaagccaccagtggcccccaagcccaagtttgttgtggcaaataataagccagccccacctcctattgcacctaaacccgacattgtgatttctagtgttccacagtcgacaaagaaaatgaaaccagcaatagccccaaaaccaaaagtcctgaagacctcacctgttcgagagattgggcagtcgccatcaaggaaaatcatgttgaacctggaagggcataaacaggaattagctgaaagcactgacaactttaattgtaaatatgaaggcaatcagagcaatgattatatttcaccaatgtgttcctgcagttctgagtgtatccataagctgggccatagagagaatttgtgtgtaaagcagcttgttttagagcccctggaaatgaatgaaaatttagaaaacagtaaaattgatgagactttgactataaaaactaggagtaaatgtgatttgtatggtgaaaaagccaagaaccagggtggggttgttttaaaggcaagcgttttagaagaggagctcaaagatgccttaatacaccaaatgccaccttttatttctgcacagaagcacaggcccacagacagcccagaaatgaatggtggctgtaattcaaatggacaattcagaattgaatttgcggatttgtcaccttccccatccagctttgaaaaagttcctgatcatcacagttgccacttacagcttcctagtgatgaatgtgaacattttgaaacttgccaggatgacagtgaaaaaagcaataattgctttcagtcatctgaactagaggctctggaaaatgggaaaaggagtactttaatatcttcagatggagttagtaagaaatcagaagtcaaagaccttggtcccttagaaattcatttagtaccatataccccaaaatttccaactcccaagcccagaaagacacgaactgctcgtctgttacgccaaaagtgtgtagatactcctagtgaaagcactgaagaaccggggaattcagacagtagctcttcctgtcttactgaaaatagtttgaaaatcaataaaatcagtgttctgcatcagaatgttttgtgtaagcaggaacaggtggataaaatgaagctaggaaataaaagtgaattgaatatggaatccaacagtgatgcacaggacttagtcaattcacagaaagccatgtgtaatgaaacaacttcctttgaaaaaatggcaccttcttttgataaagactctaatttgagttctgacagcacaactgtagatggttctagtatgtcgcttgctgtggacgaagggaccggttttataagatgtactgtatctatgagcctgcctaagcagctcaaattaacttgcaatgaacatttgcaatctgggagaaacctgggagtttctgcccctcaaatgcaaaaggaatctgttataaaagaggaaaattctctacgaattgtccccaaaaaacctcaaagacatagcttgcctgctacaggagtgcttaaaaaggctgcctccgaggagcttttggaaaaaagttcttatccttcaagtgaagaaaaaagttcagagaagagtctagaaagaaatcaccttcagcatttgtgtgcccaaaaccgtggtgtgtcatcctcctttgatatgcctaaacgggcttcagaaaagccagtgtggaagttacctcatcctattttacccttttcagggaacccagaattcttaaagtctgtcaccgtatcgtcaaacagtgagccttcaacagccctaaccaagcccagagcaaaatcgttatctgctatggatgtggaaaagtgcactaagccttgcaaagactctacaaagaaaaactcttttaaaaagttgctcagcatgaaactgtccatctgtttcatgaagagtgactttcaaaaattttggtccaagagtagccaactcggagacaccaccacaggccacctctccagtggggagcagaaggggattgaaagtgattggcaaggcttgttggtaggagaggagaagagaagtaaacccatcaaggcatattccacagaaaactatagcctggaatctcaaaagaagaggaagaagtctcggggccagaccagtgcagctaatggtctgagagctgagtctttggatgaccaaatgctctcccgggagtcatcatctcaggcaccttacaagtctgttacaagcctctgtgcaccggagtatgaaaatatacgccattatgaggaaataccagagtacgagaacttgccatttattatggctatacggaaaactcaagagttggaatggcagaattccagcagcatggaggacgctgatgcaaatgtgtatgaggtagaagagccatatgaagctccagatggccagctgcagcttggacccagacatcagcattccagttcaggagcatcccaggaggaacagaatgatcttggtcttggtgaccttccctctgatgaggaggaaatcatcaacagttctgatgaagatgatgtcagctctgagtcaagtaaaggagagcctgacccactggaagataaacaggatgaagataatggaatgaaaagtaaagttcatcatattgccaaggagatcatgagctcagagaaagtgtttgtggatgtgttaaaacttttgcatattgatttccgggatgcagtagctcatgcttccaggcaacttgggaaaccagtgattgaggaccggattctaaatcagatcctatactacttgcctcagctgtatgagctcaaccgggatctcttgaaggaactggaggaaagaatgttgcactggactgaacatcagagaattgctgatatctttgtaaagaagggaccatatctaaaaatgtattccacatacatcaaagaatttgataagaatatagccttgctggatgaacagtgcaagaaaaatccaggttttgctgctgttgttagagaatttgagatgagccctcgctgtgctaatctggccctcaagcactacctgctcaagccggttcagaggatcccccagtacaggctgttgctgacagattatttgaagaatctcatagaagatgctggagattacagagacactcaagatgcccttgctgttgttatagaggtagccaaccacgccaatgacaccatgaagcaaggagacaactttcagaaacttatgcaaattcagtacagcttaaatggacaccatgaaattgtgcagcctggtcgggtttttctcaaagaaggaattctgatgaagctgtctcggaaagtgatgcaacctcgaatgtttttcctgtttaatgatgccctgctgtatacaacaccagtgcagtctgggatgtataaactgaacaacatgctctcactggctggaatgaaggtcagaaaacctacccaagaagcctatcagaatgaattaaagattgaaagtgtagaacgttccttcattctctcagccagttctgccacagaaagggatgaatggctagaagcgatttccagggcaatagaagagtatgccaagaaaagaatcaccttctgtcctagtaggagtcttgatgaggcagactcagaaaataaagaagaagttagtcctcttggatcgaaggctcccatctggattcctgataccagagccacaatgtgtatgatctgcacaagcgaattcactctcacctggagacgacaccactgccgggcctgtggaaagattgtatgccaagcttgttcgtctaataagtatggcttagattacctgaaaaatcaaccagcaagagtatgtgaacattgtttccaagaactgcagaaattagatcaccagcactcccctaggattggatctcctggaaatcacaaatctccttcaagtgccttatcatcagtcttacatagcattccatcagggaggaaacagaaaaaaatcccagctgctctcaaagaagtatcagcaaacacagaggattcttctatgagtggctacttgtacagatcaaagggcaataaaaaaccctggaaacacttttggtttgtcataaaaaataaagtactatatacatatgctgcaagtgaggacgtggccgctttggagagtcagcctttattaggattcactgttattcaagttaaagatgagaattccgagtctaaagtatttcagttactgcacaaaaacatgttattttatgtattcaaagcagaggatgctcattcggctcagaagtggatagaagcatttcaggaaggcacaatattgtagcagtattggtttcatctcttctgtgattccaaagaggtggaatttcatcagaatggagtaaatgcaattcaaaaattgtataaaaatgaacactgccaagataaagccaaccagacccttcatcaaagaaattgttttgttaggtataagcaatttttaaaaggtgtttgttttttcatttatgttatttattaaaattttgatgtttacttaatggtcagaattatttctgagacacactgaattctaaagtaccatttctttagagaccagaaaaactatcttaatactgtatactgtattaactattcgtgacatagttcacactgttttcttaccttacattgtaacaatcttactggtggaaagtctttgtaaggaaaaaacacatagcaaggagcaaatttccacaaagtgcttggtttaggaattgtgattattataaaactgctgatgaaaaaaatgcatgtctttgaatc

SEQ ID NO: 45 - DNA, 7096 bp, Homo sapiens
gtgttgaggcagcaggatgcagagtgctgttcaagttttccagtggggtccctcaaagggacaactttgaaagatagctagcttccaaagaataagaaatagatagagttactgtacctgacttggggctgctcttaatcaagttctgcattgcaaggaagataatattcgagcgttatgaaggcggagaaggatcctgaagacgaagaaaatatcgttagagatccaagctaagtgtagcacagcatgtgagggactgagtcacttgtcaggagtttgtctgagagtttgctttgtgagcttacagagatttgtaacttaatgcaaagtagtttgccattagcaacaagaaactaaatcctgtctatgatgaactgttggttttcttgtactcctaagaacagacatgcagcagattggaataaatatgatgaccgattgatgaaagcagcagaaaggggggatgtagaaaaagtgacctcaatccttgctaaaaagggggtcaatccaggcaaactagatgtggaaggcagatctgtcttccatgttgtgacctcaaaggggaatcttgagtgtttgaatgccatccttatacatggagttgatattacaaccagtgacactgcagggagaaatgctcttcacctggctgctaagtatggacatgcattgtgcctacaaaaacttctacagtacaattgtcccactgagcatgcagacctgcagggaagaactgcacttcacgatgccgcaatggcagattgtccttctagcatacagctgctttgtgaccatggggcctctgtgaatgccaaagatgtagacgggcggacaccacttgttctggctactcagatgagtaggccaacaatatgtcaactgctgatagatagaggagcggatgttaattccagagacaaacaaaacagaactgccctcatgctaggttgcgaatatggttgcagagatgcagtagaagtcttaattaaaaatggtgctgatataagcttgctggatgcgcttggccatgatagttcttactatgcaagaattggtgacaatctggacattctaaccttgttgaagactgcatcggaaaataccaacaaagggagagaactttggaagaaagggccatctttgcaacagcgaaatttgacacacatgcaagatgaagtaaatgtgaagtcacatcagagggagcatcaaaatattcaggatttggagattgaaaatgaagatttgaaagagaggttgagaaaaattcagcaagaacaaagaatacttttggataaagtcaatggtttacagttacagctgaatgaggaagttatggttgctgatgatctggaaagcgagagagaaaagctgaagtcccttttggcagctaaagaaaagcaacatgaagaaagcttaaggactattgaggctctgaaaaatagatttaaatattttgagagtgatcatttaggatcaggaagtcatttcagtaaccgaaaagaagatatgcttcttaaacaaggtcagatgtatatggcagactcacagtgtacttccccaggtataccagcccatatgcaaagcagatctatgttaagacctctggaactatctttacccagtcaaacgtcatactctgaaaatgaaattttaaagaaagagttagaagcaatgcgaactttctgtgagtcagcaaaacaagaccgactgaagctccaaaatgaactggcacacaaagtggcagaatgcaaagctttagcattagaatgtgaaagggtcaaggaggattcagatgaacagataaagcaattagaagatgcattaaaagatgtgcagaagaggatgtatgagtcagaaggtaaagttaaacaaatgcagacccattttcttgcccttaaagaacacttaacaagtgaagcagcctcagggaatcacagactaaccgaggaactgaaggatcagttgaaagacttgaaagtaaaatatgaaggtgcttcagcagaagtggggaaattaagaaaccaaatcaaacaaaatgagatgatagtagaagagtttaagagggatgaaggcaagctgatagaagaaaataagcgattacagaaggaacttagtatgtgtgaaatggagcgagagaagaaaggaagaaaggtcacagagatggaaggccaggcaaaagaattgtcagcgaagttggccctttccattccagctgaaaaatttgaaaacatgaagagctcattatcaaatgaagtgaatgagaaagcaaaaaaattagtagaaatggaaagagaacatgaaaaatcacttagtgaaattagacagttaaagagagaacttgagaatgttaaggccaagcttgctcagcacgtcaaaccagaggaacatgaacaggttaagagcagattagaacagaaatcaggagaacttgggaagaagatcactgagttaacattgaaaaatcagacactacaaaaggaaattgaaaaagtttatttggataataagctcctcaaggagcaagcacataacttaacaattgaaatgaaaaatcattatgttcctttaaaagtaagtgaagacatgaaaaagtcacatgatgcaattattgatgatcttaatagaaagcttttagatgtaacacaaaaatatacagaaaagaagttggaaatggagaaattgctactggaaaatgacagcttaagtaaggatgtaagccgcctagaaactgtgtttgtacctcctgagaaacatgaaaaagagataatagctctgaaatccaatattgttgaacttaagaaacagctgtctgaacttaagaaaaaatgtggtgaagaccaggagaaaatacacgctctcacatctgaaaacactaacttgaagaagatgatgagtaatcagtatgtgccagttaaaacccatgaagaggttaaaatgacactgaatgacacgttagccaaaactaacagagaattattagatgtgaagaaaaaatttgaagatataaatcaggaatttgtaaaaataaaagataagaatgaaatattaaaaagaaacctggaaaacactcagaaccaaataaaagctgagtacatcagcctggcagagcacgaggcaaagatgagctcgctaagtcagagcatgagaaaggtgcaggatagtaatgctgaaatcttggccaactacagaaaaggccaagaagagattgtgacactgcatgccgaaattaaagcccagaagaaggagctcgacacaatacaagaatgcattaaggtaaaatacgccccaattgtcagctttgaggagtgcgagagaaaatttaaagcaacagagaaagaactaaaagaccagttatcagagcagacacaaaagtatagtgtcagtgaagaagaagtcaagaaaaacaagcaagagaatgacaagttaaagaaggagatttttacccttcagaaagatttgagagataagacagttctcattgagaagtctcatgaaatggaaagagcattaagcagaaaaacagacgagctaaacaaacagttaaaagacttgtcacagaaatacacggaagtaaagaatgtgaaagagaagctagtagaagaaaatgccaaacagacttctgagatacttgcagtgcaaaatcttttgcaaaaacaacatgttccattggaacaggttgaggctctgaaaaaatctcttaatggcacaattgaaaatctaaaggaagaactgaagagtatgcaaaggtgttacgagaaagagcagcagacagtgaccaaactgcatcaattgttggagaatcaaaagaactcttctgtacccctggcagagcatttgcagattaaagaagcatttgagaaagaagttggaatcataaaagccagcttgagagaaaaggaagaagaaagccaaaacaaaatggaagaagtctccaaacttcagtcggaggttcagaatactaaacaagcattaaaaaaattagagactagagaggtagttgacttgtctaaatataaagcaacaaaaagtgatttggagacacagatttctagcttaaatgaaaaattggccaatctgaatagaaagtatgaggaagtatgtgaggaagttttgcatgccaaaaagaaggaaatatctgcaaaagatgagaaggaattactgcatttcagcattgagcaagaaattaaggatcagaaggaacgatgtgataagtccttaacaacaatcacagagttacaaagaagaatacaagaatctgctaaacaaatagaagcaaaagataataagataactgaactgcttaatgatgtggaaagattaaaacaggcactcaatggcctttcccaactcacctacacaagtgggaaccccaccaagaggcagagccagctgattgacactctgcagcaccaagtgaaatctctggagcaacagctggccgatgctgacagacagcaccaagaagtaattgcaatttatcggacacaccttcttagtgctgcacagggtcacatggatgaagatgttcaggaggctctgctccagatcatacaaatgcggcaggggcttgtgtgctagccgttagcactgactgccagtatctgttttatcttgctggtgctgaacattctttgtgcaactccatggtctttctgggccttactgtgctggtataattaaaataaaatatattttgttctattggtaggtttttttttaaaattagatgaatatgttagtctttttcaatatcagtttgaatcttattttctgtatgtgttaattttacaaataggcaaacaacataactttgccctggattgactacatatttttaaaccttcaagtccctaataaaacatgagccatctgagtgagtccatatgaagcgaggttaggctgaaataattgcttaaagatgtctttcagagaaattaatttggttggtggccacttttaggtggatcaaaagacctttcagatcctcagaaccttgagacataatacagttgtgaggaatgtgttgtaacttggctggccaagttacatgttacagtatctttactgaggtaacttcattagtgtctttggccttttttgtaggtatagatattttttctttttacactaataacttttatgccttttaaaataaatttattttcataaatggtttgcagtgctaaattacatttagattaagaacaggcaggggtggaatatatcaggaatttataataaaattgccttaatctctacaacagtatcttaatttttacttgcggtgactattcttgccacaatattggagaataatgatagatgatatactagatttttcaaagtgtgaaaacctttagactttttttagcaattagtttgacattcgctactatagtaaccaagcactcattatatatgcatcctccaaatgtttcatgcttatttataggaaagttatattaatgagattaataatgtgaaatacagttttcctgcaaaattagcattagagaattgattttagataacagatttttaaagttttagagaaaagtacagtaatacagtaaactgaaagagtatatagatagcaataaaataacataagtggacatgtttatagtaaatactctgaagtaaacaaccgtttttattaactgcatctcattagggaaagtttatatgtcttgttattttttattaacattttatttaccattcagagtgaaaattactaatttgagtattaacaaataactgaataaatggatcattacagttaggttttctcaaattgcaaaatttgccttagcaattatctttgaacatcccgaaccagatttttaaatcccatttttgtttaatagggtaaaaataccatcaaaatgacttctcataccaaagaataagccatcatattttttcggtgttgaaacaacattgaaagtcagaattggatttgtttttaattctttatacggtttacataagcaatatctgtctctttaattattatgattaatgtcgtccttcagcatgagttctgtttcacaagttttgggccacctatttcaataaaaaataaaatataaattaaaaaagttgccgggggtggtggctcatgcctgtaatcccagcactttgggaggctgagggaggtagatcacctgaggtcagaagttcgagaccagccttaccaatatggtgaagccccatctctactaaaaatacaaaaattagccctgcatggtggcaggtgcctgtagtcccaggtactcgggaggctgagacaggagaatcgcttgaacctgggaggcggaggttgcagtgagccaagatctcgccactgcactccagcttgggcaatagcaagactccatctcaaaataaaataaaataaaacttagagcaaagtttaaaactgagtattcatattaagtgttttattttccatattagagatgggaagggaaccttatgtgtattttattttgttttcaaccatcaataaagttttctctagaatattgttttgaacatccttgtaaaagatttgcgagttaaactattttatttactgtctgtgagagcattgggagtaggaaacgatggactccaaagtacaagggagaatacccattttcattcagctatctggagtaaaatatcaagtacttccttcaactaatcttgtctcattcactcaccttttgatatcgaaggcagaaattgcgtttacaacactgaagaccaaagctttttaattagtaaacaagcggaacatagataatggacaatgctggccactgccattctgtgttcagaaagactatgagacctgaacatatggccaagaggaaagaagagtgacgttgtctaagatgtaatgagtgctctctgagagaatcactcaattcctattggagtgcaatccttacttgagaactttattactcttgttctgtgtagttttttttttttgtcacttccccatcagaaaagcatattctttttgatagagggtcagtgttataaataattgtcttttgaaataaaatcaaatattcatgcattgaaaaaaaaaaaaaaaaaa

SEQ ID NO: 46 - DNA, 6044 bp, Homo sapiens; identical to SEQ ID NO: 15

SEQ ID NO: 47 - DNA, 1865 bp, Homo sapiens; identical to SEQ ID NO: 28

SEQ ID NO: 48 - DNA, 5584 bp, Homo sapiens
agtctagccgcctctggtgccgctggagccccctctaggccctcctcctcctcctccctggcgggccggtccagctgtgttccattagtgtccctggcaggcccccagccccctggaaccgcctctcttcccccacccggagtggccggcagtccccggcaggcgtgcgccgggcagcagacagccgggagagctcgagcgccaggaagctggggacccgtgaccgtcacggagagatagagaacccctagcggacctgaggaacctgggctctgcttcctccgcctgctgcctggactgctcagtgaggtggggggatccccggccaccggtgctgtggctgtagctgacctctttggaccgggatgtgggtatcctgggctcctggcctgtggctgctcggtctttgggctaccttcggccatggggcaaatacaggtgcacaatgcccaccttcacagcaggaaggactcaaattggaacacagtagtagcctgccagccaacgtgactggcttcaacctcatccaccgactcagcctcatgaagacgtctgccatcaagaagatccgcaaccccaaggggcctctcatcctgcgcctgggggcggcccccgtgacccagcccacgcgaagagtattccctcggggtctcccggaggagtttgccctggtgctgacactactgctgaagaaacacacccaccagaagacgtggtatctgtttcaagtgaccgatgcaaatgggtatccacagatatccctggaagtcaacagccaagagcggagcctggagctcagggcccagggccaggatggcgactttgtgtcctgcatcttcccagtgccccagctcttcgacttgcgttggcacaagctgatgctgagtgtggctggacgtgtggcctctgtgcacgtggactgcagctcagcctcctcccagcctctggggccccgacgacccatgaggcctgtgggccatgtatttctaggcttggatgctgagcagggcaagcctgtctcgtttgaccttcagcaggtgcacatctactgtgacccggagctcgtgctggaggagggctgctgtgagattttaccagcagggtgccccccagagacctccaaggcccgccgggacacccagagcaatgagctcattgagatcaatccacagtctgaaggcaaggtctacacccgctgcttctgcctggaggagcctcaaaacagcgaggtggatgcccagctgacgggaagaatcagccagaaggcagaaaggggagcaaaggtccatcaggagacagcagccgatgagtgtccgccctgtgtccatggtgcccgggacagcaatgtcacacttgctccctctggccccaagggagggaaaggtgagcggggcctgcctggtccaccaggctccaagggagagaagggagcacggggcaatgactgtgttcgaatctccccggatgccccacttcagtgtgcagaaggcccgaagggagagaagggggagtcaggagctctgggaccctcaggactcccaggctcaacaggcgagaagggccagaaaggcgagaagggcgacggaggcatcaagggcgtgccgggaaagccaggccgggacggccggccaggagagatctgtgtcattgggcccaaagggcagaagggagaccctggctttgttgggcctgaggggctggcaggagagcctgggccccccggcctccctggaccccctgggataggactgcctgggaccccgggggatccaggtggcccaccaggccccaagggagacaagggcagctcggggatcccaggaaaggaaggccctggtgggaaacctgggaagccaggtgtgaagggagagaagggtgacccctgtgaagtgtgcccaacactgcctgaagggttccagaactttgttggacttcctggaaagccagggcccaaaggggagcctggtgatcctgtaccagccaggggagaccctggcatccaaggcatcaaaggagagaagggggagccctgcttgtcctgcagctcggttgtaggggcccagcatcttgtgtcctccacaggggccagtggagatgtgggttcccctggctttggtctgcctggccttccgggtagagctggggttccagggctgaaaggagagaagggtaacttcggggaggcagggccagctggcagtccagggccaccaggaccagtggggccagcaggcatcaaaggggcgaagggggagccctgtgagccgtgcccagccctgtccaaccttcaggatggggatgtccgtgtggtggccttgcctggcccatccggagagaagggggaacctgggcctccaggctttggcttgccaggaaaacagggcaaggctggagagcgtggactgaaggggcagaagggtgatgctgggaatcctggagaccctggaacgccgggcaccacagggcggccaggactgtcaggagagcctggagttcagggccccgcggggccaaaaggagaaaagggtgatggctgcactgcctgccccagcctgcaggggacagtgacagacatggcaggacggcctgggcagcccggccccaaaggagagcagggccccgaaggcgtgggccgacctggtaaacccggccaacccggtctaccaggagttcaagggcccccaggactgaagggcgtgcagggagagccagggcctccaggaaggggagtccagggaccccagggggagcctggagccccgggtttgcctggcattcagggacttccgggacctcggggaccacctggccccactggagagaagggtgcccagggatctccaggggtgaaaggagccaccggacctgtgggacctcctggggccagtgtctctgggcctccgggccgtgatgggcagcaaggacagacgggactcagaggaacaccaggtgaaaaaggaccacgaggagagaagggtgagccaggggagtgctcctgcccctctcaaggagacctcatcttctctggcatgccgggtgctccgggactttggatgggcagctcctggcagccgggcccgcagggtccaccaggtattcccggaccaccaggcccccctggagtacctgggctgcagggagtgcctggaaacaacggtttgccaggacagcctgggctcactgcagaactgggatccttaccaattgaacagcacctccttaagagtatctgcggggactgtgtccaggggcagagggcccacccagggtacctcgtggagaagggagagaagggagaccagggcatccctggtgtgccaggcctcgacaactgcgcccagtgctttttgtcactggagcgcccaagagccgaggaggcccggggtgacaacagtgagggagatcctggctgtgttgggagcccaggcctacctggtcctccgggattgccaggccagagaggagaagagggtccgcctggcatgaggggctccccgggtcctccaggccctatcggccccccaggttttcctggtgctgttggctcccccggattgcctggccttcaaggagagcgaggtctcacgggcctgactggagacaagggggagccgggtcctccagggcaaccaggttacccaggtgccacgggccccccaggactgcctggcatcaagggggagcgtggctacaccgggtcagcgggagagaaaggagagccgggccccccaggatctgaaggcctcccaggccccccaggcccagcgggtcccagaggagagcgaggaccccaaggtaactccggtgagaagggcgaccagggatttcaaggccagccaggctttccgggcccaccgggtccccctggattcccaggcaaagttggatcacctggcccacctggccctcaagcagagaagggcagcgaagggattcgaggcccatcaggcctgcctggctcccctgggccaccgggacctcctgggattcagggccccgccggtctggatggtttggatgggaaggacggcaagcctggcttgaggggggaccctggtcctgctggcccccctggactcatgggaccaccgggctttaaggggaaaacaggacatcctggcctcccaggacctaagggtgactgtggcaaaccaggtccccctggcagcactggccggcctggcgcagagggtgaacctggtgccatgggaccccagggaagacccggtcccccgggacacgttgggccaccagggcctccaggccagccaggaccagctgggatctctgcagtgggtctgaaaggagaccgaggagccaccggagaaaggggccttgcaggcctcccaggccagcccggcccccctggacaccctggccccccaggcgaacctggtacggatggtgcagctggcaaagagggaccccctggaaagcagggattctatggacctcctggtcccaagggtgatccaggagctgcaggacagaagggccaggcaggagagaaggggagagccggcatgcctggtggacctggcaagagtggttccatggggcctgttgggccaccgggccctgcaggagagagaggccaccctggagctccggggccttcggggagccctggcttgcctggtgtgcctggctccatgggagacatggtgaattatgatgaaatcaagaggttcatcagacaagagatcattaaaatgtttgatgagagaatggcttactacacctccaggatgcagttccccatggagatggcggcagctccgggacgaccagggcctccagggaaggatggtgctccgggcaggccaggtgctccagggtcacctgggctccctggtcagattggcagagaaggacggcagggcttgccaggagtaagaggattgcctggtaccaaaggtgaaaaaggggacattggtattggcattgcaggagaaaatggtcttcccggccccccaggtcctcaaggtcctccaggctatggcaagatgggtgcaacaggaccaatgggccagcaaggcatccctggcatccctgggcccccgggtcccatgggccagccaggcaaggctggccactgtaatccctctgactgctttggggccatgccgatggagcagcagtacccacccatgaaaaccatgaaggggccttttggctgaaattccccacctgcctttggatgaaagactccgttgggaataaatggccaaagcttataggactctgtgacaggttgtgaatgttttttttgttgttgttgttgtttttaattgctgttaatattttttaaataataaagaaacaaaactatctgccctttcccttccagtgggttcctctggtgctgcagccagagctccctgttgccctccttttcccgtttagtcccaggaacaaaaaagggcattttgggtacaggggcatatacctgtaatcctagctattcaaggggctgaggtgggaggatcgcctgagcccaggagtttgagaccagtctaagcaacataatgagactcagtctccgaaaaataaaaattaaaaaataaagggtatttccctcctt

SEQ ID NO: 49 - DNA, 6069 bp, Homo sapiens
gtcctgtctggcggtgccgacggtgaggggcggtggcccaacggcgggagattcaaacctggaagaaggaggaacatggagaggagagcagcgggcccaggctgggcagcctatgaacgcctcacagctgaggagatggatgagcagaggcggcagaatgttgcctatcagtacctgtgccggctggaggaggccaagcgctggatggaggcctgcctgaaggaggagcttccttccccggtggagctggaggagagccttcggaatggagtgctgctggccaagctgggccactgttttgcaccctccgtggttccgttgaagaagatctacgatgtggagcagctgcggtaccaggcaactggcttacatttccgtcacacagacaacatcaacttttggctatctgcaatagcccacatcggtctgccttcgaccttcttcccagagaccacggacatctatgacaaaaagaacatgccccgggtagtctactgcatccatgctctcagtctcttcctcttccggctgggattggcccctcagatacatgatctatacgggaaagtgaaattcacagctgaggaactcagcaacatggcgtccgaactggccaaatatggcctccagctgcctgccttcagcaagatcgggggcatcttggccaatgagctctcggtggatgaggctgcagtccatgcagctgttcttgccatcaatgaagcagtggagcgaggggtggtggaggacaccctggctgccttgcagaatcccagtgctcttctggagaatctccgagagcctctggcagccgtctaccaggagatgctggcccaggccaagatggagaaggcagccaatgccaggaaccatgatgacagagaaagccaggacatctatgaccactacctaactcaggctgaaatccagggcaatatcaaccatgtcaacgtccatggggctctagaagttgttgatgatgccctggaaagacagagccctgaagccttgctcaaggcccttcaagaccctgccctggccctgcgaggggtgaggagagactttgctgactggtacctggagcagctgaactcagacagagagcagaaggcacaggagctgggcctggtggagcttctggaaaaggaggaagtccaggctggtgtggctgcagccaacacaaagggtgatcaggaacaagccatgctccacgctgtgcagcggatcaacaaagccatccggaggggagtggcggctgacactgtgaaggagctgatgtgccctgaggcccagctgcctccagtgtaccctgttgcatcgtctatgtaccagctggagctggcagtgctccagcagcagcagggggagcttggccaggaggagctcttcgtggctgtggagatgctctcagctgtggtcctgattaaccgggccctggaggcccgggatgccagtggcttctggagcagcctggtgaaccctgccacaggcctggctgaggtggaaggagaaaatgcccagcgttacttcgatgccctgctgaaattgcgacaggagcgtgggatgggtgaggacttcctgagctggaatgacctgcaggccaccgtgagccaggtcaatgcacagacccaggaagagactgaccgggtccttgcagtcagcctcatcaatgaggctctggacaaaggcagccctgagaagactctgtctgccctactgcttcctgcagctggcctagatgatgtcagcctccctgtcgcccctcggtaccatctcctccttgtggcagccaaaaggcagaaggcccaggtgacaggggatcctggagctgtgctgtggcttgaggagatccgccagggagtggtcagagccaaccaggacactaatacagctcagagaatggctcttggtgtggctgccatcaatcaagccatcaaggagggcaaggcagcccagactgagcgggtgttgaggaaccccgcagtggcccttcgaggggtagttcccgactgtgccaacggctaccagcgagccctggaaagtgccatggcaaagaaacagcgtccagcagacacagctttctgggttcaacatgacatgaaggatggcactgcctactacttccatctgcagaccttccaggggatctgggagcaacctcctggctgccccctcaacacctctcacctgacccgggaggagatccagtcagctgtcaccaaggtcactgctgcctatgaccgccaacagctctggaaagccaacgtcggctttgttatccagctccaggcccgcctccgtggcttcctagttcggcagaagtttgctgagcattcccactttctgaggacctggctcccagcagtcatcaagatccaggctcattggcggggttataggcagcggaagatttacctggagtggttgcagtattttaaagcaaacctggatgccataatcaagatccaggcctgggcccggatgtgggcagctcggaggcaatacctgaggcgtctgcactacttccagaagaatgttaactccattgtgaagatccaggcatttttccgagccaggaaagcccaagatgactacaggatattagtgcatgcaccccaccctcctctcagtgtggtacgcagatttgcccatctcttgaatcaaagccagcaagacttcttggctgaggcagagctgctgaagctccaggaagaggtagttaggaagatccgatccaatcagcagctggagcaggacctcaacatcatggacatcaagattggcctgctggtgaagaaccggatcactctgcaggaagtggtctcccactgcaagaagctgaccaagaggaataaggaacagctgtcagatatgatggttctggacaagcagaagggtttaaagtcgctgagcaaagagaaacggcagaaactagaagcataccaacacctcttctacctgctccagactcagcccatctacctggccaagctgatctttcagatgccacagaacaaaaccaccaagttcatggaggcagtgattttcagcctgtacaactatgcctccagccgccgagaggcctatctcctgctccagctgttcaagacagcactccaggaggaaatcaagtcaaaggtggagcagccccaggacgtggtgacaggcaacccaacagtggtgaggctggtggtgagattctaccgtaatgggcggggacagagtgccctgcaggagattctgggcaaggttatccaggatgtgctagaagacaaagtgctcagcgtccacacagaccctgtccacctctataagaactggatcaaccagactgaggcccagacagggcagcgcagccatctcccatatgatgtcaccccggagcaggccttgagccaccccgaggtccagagacgactggacatcgccctacgcaacctcctcgccatgactgataagttccttttagccatcacctcatctgtggaccaaattccgtatgggatgcgatatgtggccaaagtcctgaaggcaactctggcagagaaattccctgacgccacagacagcgaggtctataaggtggtcgggaacctcctgtactaccgcttcctgaacccagctgtggtggctcctgacgccttcgacattgtggccatggcagctggtggagccctggctgccccccagcgccatgccctgggggctgtggctcagctcctacagcacgctgcggctggcaaggccttctctgggcagagccagcacctacgggtcctgaatgactatctggaggaaacacacctcaagttcaggaagttcatccatagagcctgccaggtgccagagccagaggagcgttttgcagtggacgagtactcagacatggtggctgtggccaaacccatggtgtacatcaccgtgggggagctggtcaacacgcacaggctgttgctggagcaccaggactgcattgcccctgatcaccaagaccccctgcatgagctcctggaggatcttggggagctgcccaccatccctgaccttattggtgagagcatcgctgcagatgggcacacggacctgagcaagctagaagtgtccctgacgctgaccaacaagtttgaaggactagaggcagatgctgatgactccaacacccgtagcctgcttctgagcaccaagcagctgttggccgatatcatacagttccatcctggggacaccctcaaggagatcctgtccctctcggcttccagagagcaagaagcagcccacaagcagctgatgagccgacgccaggcctgtacagcccagacaccggagccactgcgacgacaccgctcactgacagctcactccctcctgccactggcagagaagcagcggcgcgtcctgcggaacctacgccgacttgaagccctggggttggtcagcgccagaaatggctaccaggggctagtggacgagctggccaaggacatccgcaaccagcacagacacaggcacaggcggaaggcagagctggtgaagctgcaggccacattacagggcctgagcactaagaccaccttctatgaggagcagggtgactactacagccagtacatccgggcctgcctggaccacctggcccccgactccaagagttctgggaaggggaagaagcagccttctcttcattacactgctgctcagctcctggaaaagggtgtcttggtggaaattgaagatcttcccgcctctcacttcagaaacgtcatctttgacatcacgccgggagatgaggcaggaaagtttgaagtaaatgccaagttcctgggtgtggacatggagcgatttcagcttcactatcaggatctcctgcagctccagtatgagggtgtggctgtcatgaaactcttcaacaaggccaaagtcaatgtcaaccttctcatcttcctcctcaacaagaagtttttgcggaagtgacagaggcaaagggtgctacccaagcccctcttacctctctggatgctttctttaacactaactcaccactgtgcttccctgcagacacccagagctcaggactgggcaaggcccagggattctcaccccttccccagctgggaggagcttgcctgcctggccacagacagtgtatcttctaattggctaaagtgggccttgcccagagtccagctgtgtggcttttatcatgcatgacaaacccctggctttcctgccagatggtaggacatggaccttgacctgggaaagccattactcttgtgtctgctactgccctcccacagtcaccccaatattacaagcactgccccagcggcttgatttcccctctgccttccttctctctgcactcccacaaagccagggccaggctccccatccctacctcccactgcatcagcagtgggtgttcctgcccttcctgagtctaggcagctctgctgctgtgatctgcacaccctccaacctgggcagggactggggggatgcagtgtgtgttagtgcccatgtggcattgtggcactgttgccccccatggcggcatgggcaagatgaccttccattagcttcaagtcttgttctcttgtctgtggtctgtttaatatgtgggtcactagggtatttattctttctcccatccttacactctggatcattgtgcagacttaatcagggttttaacgctttcatttttttttttttttttttttttttgagctcaaagagagttctcattttccctattcaaactaatacccatgccgtgttttttaccttggatttaaagtcaccttaggttggggcaacagattctcactcatgtttaagatcttgttatttcagcttcataagatcaaagaggagtctttcccttttctcttttaccctcaggattctcatcccttacagctgactcttccaggcaatttccatagatctgcagtcctgcctctgccacagtctctctgttgtccccacatctacccaacttcctgtactgttgcccttctgatgttaataaaagcagctgttactcccaaaaaaaaaaaaaaaaaa

SEQ ID NO: 50 - DNA, 5534 bp, Homo sapiens
gatagtcagtgtgagtttgagaaagaaaaacacactgtagagctctactataaaagttaataggatagattgttaaactacattctgccatctttggctatttggttgctaaatactttagaatattacttacagctaggctgattataacagaagaaggattaagtatgacagcttgtctcaataatggaagtaaaaagcagagatcctggaaagaatctgccatccatcagaggaatttgtctgactttgtggtattgctagggggtgtatggttggagtattattttgatggtgctggatcaccctcatcacagtaaactcaagaacataggacagcttgtgaaataggttcttacttgtaaggaggaacatatgcagcagaaaaaagaggaggaagaagttcttaaagaagtaactgcacatttccaaattactttaactgaaactcaagcccagctggaacagcatgaaatacacaatgccaaactgcagcaggagaacatggaaatgggagaaaagctaaagaagctcactgaccagtatgcactgagggaagaggtaaacggcgtttggtttgtttatagacagctgctcaccagtagcaaaagctacaccctaccgtaaagtaaaaactctttcacaggacagtattttagaacttttgtgtatgcacagtggaaattacatgtttattaggaaaagagtagaaacctgtaaacagaatgactaaattggagcatcacttggcccaagtgtcagtggagtaggataagtaaagggatttctaggagatgtgtaccacttgtctcccatatgatgctacaagattgtcaatatagcatacagatatttttctcttatgcagtctaataatacagatttgttccctaaatactctgtatctcagatttctgtgacaatctgaacaatataaataggagaattgtgctatttgtgagaataaggaacctactaattacccatcaccaagtcacattgtttgtgtaatcaatgaagtaagaagtttgtggaggactcaatagttgtcgaacctagtcattggagttattttataaattgatgtggaagttgtatgatggctaaataaaaaacaaataggtgataacctgcttatttgtttttattttttctttacttttagaggtctatacatagggtaagatttcaattttcaaaggatgcatccccttcctttattatgctttaagctagtaaaatatatatttaaatccttacttagtagattaaaattggaaatagaaagtgacaatttaaaaattaataaaacagtaaatattactttatgcatatcaaaatgttattttgagttacaccttttcatgctacttttgaaaacatttttctttaagattttgagtatcttttaaaccattttcctctatgtttcaagaacatttcaaacttattatggaagctgcaaacttatagtagaatatatcacttggctttagcaattatttacttttgtttctagcaactcttgtttccatctaattttaagcaaatccaagatattatatcattttatttattactattcaaatatgcatcatgaaataagattctttttaagccataatcactgtactatttttactccaaaaggttaaacaattgctatgtaatcacataccttctcactgtactatttaaatatctgttacttcccttttccttcaggttgtttacatcaacatcaaaataaggtttatacattttattgttttaatatgtctcaagtctttttagtatataagcttcccccccctcttttttttccttggaatgtatttattaaagaaattttttaggcctatatagtgaacttttaaaattaaatttgttttatattataaagcatattatgaatatcatcagtttttttaaaagaatcctttaaattccattgttttaaataatggtattaaaaatgattaattttattttattttttattattttactctttaggatttatattattttaactgtattaaactctccaaatttgctatagaagtagcagattgggagaggacatgtgttcaagttgtactacttgtatgtcttgtttagatattacagtctttttcttttatcagaaaataattgaataatgataaaatcagttgcagattaagacagattatctgttgcagtcttctcaaaacttaatttaagtacattattttcagctagcatttcttccttcacatagaacctccatgtgtggagggatttcctaatgagtctattgtatgtacaatagcacttaatgacatagcttttaaataataacaggattttaccaaatgtttaatatgtgccaggcatcaagcaccttacacagtttaattattgcatagatttggacagcaactctgcaagttaggtatggtcatgaacctttgcagataaggaaactgtgtttcacaaggagaagaaattgtcctggatcatacaataagctaggatttgctccagaccatttttttcattttatcaggctacctacaattaaggaattcagaagattttgtgaacaaaaatgtccaggaattatgtgtgtaataaatgaatttgatattttgatctccttatccatctttttcttgataaaatatcagcttttttttttccaatgtagggcagaagcaagaagtacagatattttgatggggacagcccacgtctgatagggtgggacatggggcagcagttagagggttgtgctctttctagtgtgggatagtttgcaagatgatatgttgtagccacttctgcagtgacggggacagaaggagtcagtgttcttaactacagtggtagcagcagaaaagaagggtaagcagggttctagaaatttgtgttatgttttctccccactgtatttatttctttggttagtggtgcaagaaattctgttttcctgtagcaaattaataaagcgttcaaacataaggaattacgacaacagcttgtagatgccagacttcaacaaacagcacagctgataaaagaagctgatgaaagacatcagagagagagagagtttgtaagttctacttcttggaaaaaaaaaaaagatcgccaaaattgtaaccaaagccatttaaaacaaactcctcacttaacatagtgccagggcatgcaattttgtttcttactctctggatgtgggatatgcgagtgtgtgtgtgtgtgtgtgtgtgtgtgtattaagctttctgtttctgatgaaattttcatatgaaatttactggagataagattaaattagtggaaaaacaagataattttgctttctatgtagtggtcaccaagttaaagaattgtgccagttattaggcaagataggctttgagatttagggacagttaaattttacaccaacttagtgaacatgagacttctacctagtgttacatttcatttttaaataagcaatttaaaaattggtaaatgatttgtttactttgattatattctggtataattttctgacaaaattatctgtgtcttggtcagcattgttgctagaatatgtattcagattttgtctgtccataattgagaacacagaaaaaatctaatttgactatacccatttacccccatggaaatgaaactatattctatgaatgaaaaatgattttaataatgtggtgtattacattttcttcattcaagtaatgtaggccctgagtagagcatgttatgaatatttagttccttagtgttttctcattcaagcctctcatattgaatgagtctagggtttggagagatgtttcacacagcatgtctcttcagtgcaagctgacagatatcagtgcacaattaaagaaacttaattgcacctttcaacttggagtataaattttgtatgtatctatgtatatctatgtgtgtattttgtggtttaaggcttatttacataatatgtgacattttacctcagaaattcagtgactgaatttcacagctgcttcccatgcatctttattatctatgtttctgaaaaactcaaatactaactaatctcttttcttcccttagctgttcctttcctgtggttttaaaaaagtgaccagaaactaggtctctattttcattgctttgctgcatattcttttaacctgcttttatcctttacagagttgaggggctttctaaataacctagacaacgtcaagattcttagctgcgttttctgtctaaaagtgtagatgtctagttattcctcatgtaaaacacaacatttcaaccctgagtactataaactttattatgcttctaggttactttttctctttaagcaattattcctacattcctaagtgttcaccagtggaacagataagagatagaagtagttagaaattgagataattgggttgacctgtcattgttgccaggataattactggaagattaagcctatctgttagacattttgaccatgtttataattgttgttagtattctgtcagaatgtatctgttttctagttattaaaagaagcaacagaatcgaggcacaaatatgaagaaatgaaacaagaagaagcacaactgaaagagcagcttttcctttatatggataagtttgaagaattccagactaccatggcaaaaaccaatgaactttttacagccttcaagcaggaaacggaaaagctgacaaagaaaattaaaaaactggaaaaagagatggtaatatggtataccaaatgggaaaataataatacaacacttctgcaaatggctgaagagaaaactattcgtgataaaaattataaggtctttcaaataaaattggagcggttagagaagctgtacaaggctcttcaaatagaaaggaatgaactcagtgagaaactgggaattctgaaagggcaggtctctgtgaaagtagcagatgtagatttagcagtgcctgtgacgcattcctgtgctgacctggattcttccaatatgctgaacacttcctctaaaagagccccaggagtccatctggaggctgaccccaaaggaatgaatgaagtaaaatgctactcaaaagccctctccacaggatctcctctaggcattgattaagattaagtgtgatcattgtactgatggatatattttgtgtacatgtttctcttttagttgtaactattgattttataatgaaaatttcctctcctttttctaccatatctctgtttttttagaactactcaactgtgtggtaacagaaagcttcttaccaatttccccaactatgttgcacatcagcctcattttccccctttattggaatgcatgttttcattgccttctcctttcaaagtgtacgtttgtgtgttcatcaccttaaattatcttaatttgagacttttttataatggtttcgtaatgtgaaatcaaatactaatttaaactctggagcccataatatctacataaaagaaaatataaactgacaaaaaaaaaaaaaaa

SEQ ID NO: 51 - DNA, 3495 bp, Homo sapiens
ccagtctgcggaccgttcggagcaacgtggcggcccttgcccgccagcaatgcctaggagcagccaagcagggacccgtcggaaacccttcatccagcctttctctggcgcatggagaacctgggggtcggcgaaggggcagaggcttgcagcaggttgagtcgctctcgcggccgccacagcatgaccagagccccgaagcacctgtggcggcaaccccggcgccccatccgcatccaacagcgcttctattcggatccggacaagtccgcgggctgccgcgagagggacctgagcccgcggccggagctcaggaagtcgcggctctcctggcccgtttcctcctgcaggcgctttgacctggaaaatgggctctcgtgtgggaggagggccctggaccctcagtccagccctggcctgggccggattatgcaggctccagtcccgcacagccagcggcgcgagtccttcctgtaccgctcagatagcgactatgaactctcgcccaaggccatgtctcggaactcctctgtggccagcgacctacatggagaggacatgattgtgacgccctttgcccaggtcctggccagtctgcggaccgttcggagcaacgtggcggcccttgcccgccagcaatgcctaggagcagccaagcagggacccgtcggaaacccttcatccagcaatcagctccctcctgcagaggacacggggcagaagctggcattggagacgctagacgagctggactggtgcctggatcagttggagacgctgcagacccggcactcggtgggggagatggcctccaacaagttcaagcggatcctgaaccgggagttgacccacctgtccgaaaccagccgctccgggaaccaggtgtccgagtacatctcccggaccttcctggaccagcagaccgaggtggagctgcccaaggtgaccgctgaggaggccccacagcccatgtcccggatcagtggcctacatgggctctgccacagtgccagcctctcctcagccactgtcccacgctttggggtccagactgaccaggaggagcaactggccaaggagctagaagacaccaacaagtggggacttgatgtgttcaaggtggcggacgtaagtgggaaccggcccctcacagctatcatattcagcatttttcaggagcgggacctgctgaagacattccagatcccagcagacacactggccacctacctgctgatgctggagggtcactaccacgccaatgtggcctaccacaacagcctacatgccgccgacgtggcccagtccacgcatgtgctgctggctacgcccgccctcgaggctgtgttcacagacttggaaatcctggctgccctctttgcaagcgccatccacgacgtggaccatcctggggtctccaaccagtttctgattaacaccaactcagacgtggcgcttatgtacaacgacgcctcggtgctggagaaccatcacctggctgtgggcttcaagctgctgcaggcagagaactgcgatatcttccagaacctcagcgccaagcagcgactgagtctgcgcaggatggtcattgacatggtgctggccacagacatgtccaaacacatgaacctcctggccgacctcaagaccatggtggagaccaagaaggtgacaagcctcggtgtcctcctcctggacaactattccgaccgaatccaggtcttgcagaacctggtgcactgtgctgatctgagcaaccccaccaagccgctgcccctgtaccgccagtggacggaccgcatcatggccgagttcttccagcagggagaccgcgagcgtgagtcgggcctggacatcagtcccatgtgtgacaagcatacggcctcagtggagaagtcccaggtgggtttcattgactacattgctcacccactgtgggagacttgggctgacctggtccacccagatgcacaggacctgctggacacgctggaggacaatcgagagtggtaccagagcaagatcccccgaagtccctcagacctcaccaaccccgagcgggacgggcctgacagattccagtttgaactgactctggaggaggcagaggaagaggatgaggaggaagaagaggagggggaagagacagctttagccaaagaggccttggagttgcctgacactgaactcctgtcccctgaagccggcccagaccctggggacttacccctcgacaaccagaggacttagggccagccctgcgtgaactgcaggggcaatggatggtaaagccctttggctcttggcaggcagactttccaggaagaggctccatgtggctcctgcttcactttcccacccatttagggagacaatcaagctcttagttataggtggctcccagggtctaattggaggcacctggctggggtccactctgaccctagacttgcctaaaagagctctctaaggggcagcctcttacgatgccctggtgtctttctcctgggcttctatccctgtgaggagaggtgctgtctgctggagcctctagtccaccctctccagtggtcactcttgagtcacatctgtcacttaattatttccttctttatcaaatatttattgctcatctacttcgggccagctttctgcctctgtagtagccctgcacaaagggtggggagtcaggagaccatcccaaaggcatctccctgtcttcctctaccaagcggctctctgcaagagcatggaaatgtgagtggggaaaattttcagcaccaaagcttcactcatacccagttttgtttctgaaactacggtagggggcaggaagaggagcagaaaagaagggctgggcaaggcatagtggcttatgcctgtaatcccggtactttgggaggctgaggtgggaggactgcttaagctcaggagtttgagaccagcctgggcaacatagcaagacccccaccatctctgaaaaaaaaaattagccaggcatggtggtgtgcacctgagaatcccagctactcagaaggttgagacaaaggggatcgcttgagcccaggagttggaggctgaagagagctatgactgcatcactgcactccagcctgggcaacacagcaagatcctgtctaaaaataaaaagaaaagagaaggaaaggaaagagacggggctctgaggccgagcacagtggcccatgcctataatcccagcactttgggaggctgaggcaggtggatcacctgaggttaggagttcgagaccagcctggccaacatggtgaaaccccatctctactaaaaatacaaaaattggctgggcatggtggcgggtgcctgtaatcccagctactggggaggctgaggcaggagaatcacttgaattcaggaggtggaggttgcagtgagccgacatcatgccactgcactccagcctggggctgacagagcaagacactgtctcaaaaaagaaaaaaaaaaaaaaaaaaa

SEQ ID NO: 52 - DNA, 3149 bp, Homo sapiens
cctttcccagagtgctctgcgccgtgaagaagcggctcccggggactgggggcattttgtgttggctggagctggagtaacaagatggcgtcgtccgcggagtgacaggggtccctctgggccggagccggcggcagtggtggcagcggtatcgccgccctagctcaccgcgccccttttccagcccgcgacgtcgccgcgcaagcgaggcagcggcggccgccgagaaacaagtggcccagcctggtaaccgccgagaagcccttcacaaactgcggcctggcaaaaagaaacctgactgagcggcggtgatcaggttcccctctgctgattctgggccccgaaccccggtaaaggcctccgtgttccgtttcctgccgccctcctccgtagccttgcctagtgtaggagccccgaggcctccgtcctcttcccagaggtgtcggggcttggccccagcctccatcttcgtctctcaggatggcgagtagcagcggctccaaggctgaattcattgtcggagggaaatataaactggtacggaagatcgggtctggctccttcggggacatctatttggcgatcaacatcaccaacggcgaggaagtggcagtgaagctagaatctcagaaggccaggcatccccagttgctgtacgagagcaagctctataagattcttcaaggtggggttggcatcccccacatacggtggtatggtcaggaaaaagactacaatgtactagtcatggatcttctgggacctagcctcgaagacctcttcaatttctgttcaagaaggttcacaatgaaaactgtacttatgttagctgaccagatgatcagtagaattgaatatgtgcatacaaagaattttatacacagagacattaaaccagataacttcctaatgggtattgggcgtcactgtaataagtgtttagaatctccagtggggaagaggaaaagaagcatgactgttagtacttctcaggacccatctttctcaggattaaaccagttattccttattgattttggtttggccaaaaagtacagagacaacaggacaaggcaacacataccatacagagaagataaaaacctcactggcactgcccgatatgctagcatcaatgcacatcttggtattgagcagagtcgccgagatgacatggaatcattaggatatgttttgatgtattttaatagaaccagcctgccatggcaagggctaaaggctgcaacaaagaaacaaaaatatgaaaagattagtgaaaagaagatgtccacgcctgttgaagttttatgtaaggggtttcctgcagaatttgcgatgtacttaaactattgtcgtgggctacgctttgaggaagccccagattacatgtatctgaggcagctattccgcattcttttcaggaccctgaaccatcaatatgactacacatttgattggacaatgttaaagcagaaagcagcacagcaggcagcctcttccagtgggcagggtcagcaggcccaaacccccacaggcaagcaaactgacaaaaccaagagtaacatgaaaggtttctaagcatgaattgaggaacagaagaagcagagcagatgatcggagcagcatttgtttctccccaaatctagaaattttagttcatatgtacactagccagtggttgtggacaaccatttacttggtgtaaagaacttaatttcagtataaactgactctgggcagcattggtgatgctgtatcctgagttgtagcctctgtaattgtgaatattaactgagatagtgaaacatggtgtccggttttctattgcattttttcaagtggaaaagttaactaaatggttgacacacaaaaattggtggagaaattgtgcatatgccaattttttgttaaaaccttttgttttgaactatactgctttgagatctcatttcagaagaacggcatgaacagtcttcagccacagttgtgatggttgttaaatgctcacaattgtgcattcttagggtttttccatccctggggtttgcaagttgttcacttaaaacattcttaaaatggttggcttcttgtctgcaagccagctgatatggtagcaaccaaagattccagtgtttgagcatatgaaagactctgcctgcttaattgtgctagaaataacagcatctaaagtgaagacttaagaaaaacttagtgactactagattatccttaggactctgcattaactctataatgttcttggtattaaaaaaaaagcatatttgtcacagaaatttagttaacatcttacaactgaacatgtatgtatgttgcttagataaatgtaatcactgtaaacatctatatgatctgggattttgtttttattttgaaatgggagcttttttgtttacaagttcattaaaaactaaaaactgtttctgtaaggaaatgagattttttttaaacaacaaaaaatgccttgctgactcactattaaataaaaatctccccaattttttgatagactacttcaagccatttgttacatggtattcctttgcaagtcaatttaggtttcgtgttataacttttcctctttttttaagaaaaatgaaaaaagtaattcttttgtctgaaggggaaaggcattctttcatttttttctttttttttttttttttttatgacttgcaggcacaatatctagtactgcaactgccagaacttggtattgtagctgctgcccgctgactagcagctggactgattttgaataaaaatgaaagcattaaagggtttccctacaaaacatttttctttaaaatacttttgaaatggctataagcagttgactttcacccttggagagcatcacactgtgtgaggttcagtgattgttgaccctccccagcccctcctgcttctttaagttatctgtgtgcgtgcgcttcctctcaatcttctttgcacgctcatttctttttctctgacccatgagaaaggaaaacttactgatgataatttttaaatagtgtaatttattcatttatagcatgtcaggataaattaaaagaacatttgtctggaaatgctgccgggagcctattgtgtaaatgtaggtattttgtaaaataaccttgaaattg

SEQ ID NO: 53 - DNA, 3376 bp, Homo sapiens
ggcgaccgaacgcggcggtcggcagcgttcgcgcgggggcctgcgaagcgctgctcggggccggcactgcccgcggggaggacgcgccgccgccgccacccagcgccgccgccgccgccgcctccagccgggccgccgcgcgtcccgggggccggccccgcgagcgcaggagtaaacaccgccggagtcttggagccgctgcagaagggaataaagagagatgcagggatttgtgaggttacggcgccccagctgcaagatgcactagccggctgaacccgggatcggctgacttgttggaaccggagtgctctgcacggagagtggtggatgagttgaagttgccttcccggggctcattttccacgctgccgagaggaatccgagaggcaaggcaatcacttcgtcttgccattgattgggtatcgggagctttttttttctcccctctctctttcttttcctccgtcttgttgcatgcaagaaaattacagtccgctgctcgcccgccctgggtgcgagatattcagccccgctctctcccgtgcattgtgcaacccaaagatgaaagaccgaaggggagaaagttaaagaaatcgcccacatgcgctggatcagtccacggcttggggaaaggcatccagagaaggtgggagcggagagtttgaagtctttacaggcgggaagatggcggactggagctgaaagtgttgattgggaaacttgggtgattcttgtgtttatttacaatcctcttgacccaggcaggacacatgcaggccaaaaaacgctatttcatcctgctctcagctggctcttgtctcgcccttttgttttatttcggaggcttgcagtttagggcatcgaggagccacagccggagagaagaacacagcggtaggaatggcttgcaccaccccagtccggatcatttctggccccgcttcccggacgctctgcgccccttcgttccttgggatcaattggaaaacgaggattccagcgtgcacatttccccccggcagaagcgagatgccaactccagcatctacaaaggcaagaagtgccgcatggagtcctgcttcgatttcaccctttgcaagaaaaacggcttcaaagtctacgtatacccacagcaaaaaggggagaaaatcgccgaaagttaccaaaacattctagcggccatcgagggctccaggttctacacctcggaccccagccaggcgtgcctctttgtcctgagtctggatactttagacagagaccagttgtcacctcagtatgtgcacaatttgagatccaaagtgcagagtctccacttgtggaacaatggtaggaatcatttaatttttaatttatattccggcacttggcctgactacaccgaggacgtggggtttgacatcggccaggcgatgctggccaaagccagcatcagtactgaaaacttccgacccaactttgatgtttctattcccctcttttctaaggatcatcccaggacaggaggggagagggggtttttgaagttcaacaccatccctcctctcaggaagtacatgctggtattcaaggggaagaggtacctgacagggataggatcagacaccaggaatgccttatatcacgtccataacggggaggacgttgtgctcctcaccacctgcaagcatggcaaagactggcaaaagcacaaggattctcgctgtgacagagacaacaccgagtatgagaagtatgattatcgggaaatgctgcacaatgccactttctgtctggttcctcgtggtcgcaggcttgggtccttcagattcctggaggctttgcaggctgcctgcgtccctgtgatgctcagcaatggatgggagttgccattctctgaagtgattaattggaaccaagctgccgtcataggcgatgagagattgttattacagattccttctacaatcaggtctattcatcaggataaaatcctagcacttagacagcagacacaattcttgtgggaggcttatttttcttcagttgagaagattgtattaactacactagagattattcaggacagaatattcaagcacatatcacgtaacagtttaatatggaacaaacatcctggaggattgttcgtactaccacagtattcatcttatctgggagattttccttactactatgctaatttaggtttaaagcccccctccaaattcactgcagtcatccatgcggtgacccccctggtctctcagtcccagccagtgttgaagcttctcgtggctgcagccaagtcccagtactgtgcccagatcatagttctatggaattgtgacaagcccctaccagccaaacaccgctggcctgccactgctgtgcctgtcgtcgtcattgaaggagagagcaaggttatgagcagccgttttctgccctacgacaacatcatcacagacgccgtgctcagccttgacgaggacacggtgctttcaacaacagaggtggatttcgccttcacagtgtggcagagcttccctgagaggattgtggggtaccccgcgcgcagccacttctgggataactctaaggagcggtggggatacacatcaaagtggacgaacgactactccatggtgttgacaggagctgctatttaccacaaatattatcactacctatactcccattacctgccagccagcctgaagaacatggtggaccaattggccaattgtgaggacattctcatgaacttcctggtgtctgctgtgacaaaattgcctccaatcaaagtgacccagaagaagcagtataaggagacaatgatgggacagacttctcgggcttcccgttgggctgaccctgaccactttgcccagcgacagagctgcatgaatacgtttgccagctggtttggctacatgccgctgatccactctcagatgaggctcgaccccgtcctctttaaagaccaggtctctattttgaggaagaaataccgagacattgagcgactttgaggaatccggctgagtgggggaggggaagcaagaagggatgggggtcaagctgctctctcttcccagtgcagatccactcatcagcagagccagattgtgccaactatccaaaaacttagatgagcagaatgacaaaaaaaaaaaggccaatgagaactcaactcctggctcctgggactgcaccagactgctccaaactcacctcactggcttctgtgtcccaagactaggttgtgtacagtttaattatggaacattaaataattatttttgaaatgattgctatgcaggtttaaacttttttaatgatcaaaactattaaaaaccagagttctttgtttaatcaaaaaaaaaaaaaaaaa

SEQ ID NO: 54 - DNA, 6309 bp, Homo sapiens
cggggccaaagacctggtgtgttccaagatgtccagggccaaggatgccgtgtcctccggggtggccagcgtggtggacgtggctaagggagtggtccagggaggcctggacaccactcggtctgcacttacgggcaccaaggaggcggtgtccagcggggtcacaggggccatggacatggctaagggggccgtccaagggggtctggacacctcgaaggctgtcctcaccggcaccaaggacacggtgtccactgggctcacgggggcagtgaatgtggccaaagggaccgtacaggccggtgtggacaccaccaagactgtgctgaccggcaccaaagacacagtgactactggggtcatgggggcagtgaacttggccaaagggactgtccagactggcgtggaaacctccaaggctgtgctgaccggcaccaaagatgctgtgtccactgggctcacaggggcagtgaatgtggccagaggaagcattcagaccggtgtggacaccagtaagactgtcctaacaggtaccaaggacaccgtctgtagtggggtgaccagtgccatgaatgtggccaaaggaaccatccagaccggcgtggacaccagtaagactgtcctaacaggtaccaaggacaccgtctgtagtggggtgactggtgccatgaatgtggccaaaggaaccatccagaccggcgtggacaccagtaagactgtcctaacaggtaccaaggacaccgtctgtagtggggtgactggtgccatgaatgtggccaaaggaaccatccagaccggcgtggacaccaccaagactgtcctaactggcaccaagaacactgtctgcagtggggtgaccggtgccgtgaacttggccaaagaggccatccaggggggcctggataccaccaagtctatggtcatgggtacgaaagacacgatgtccactgggctcacgggggcagcgaatgtggccaagggggccatgcaaactgggctgaacacaacccaaaatatcgcaacaggtacaaaggacaccgtctgcagtggggtgactggtgccatgaatttggccagaggaaccatccagacaggcgtggacaccaccaagatcgttctaactggtaccaaggacactgtctgcagtggggtcaccggtgctgcgaatgtggccaaaggggccgtccaggggggcctggacactacaaagtctgtcctgactggcactaaagatgctgtgtccactgggctcacaggggctgtgaacgtggccaaagggaccgtccagaccggcgtagacaccaccaagactgtcctaaccggcaccaaggacaccgtctgcagtggggtgaccagtgctgtgaacgtggccaaaggggccgtccaggggggcctggacaccaccaagtctgtggtcataggtacaaaagacacgatgtccactgggctcacgggggcagcgaatgtggccaagggggctgtccagacaggtgtagacacagccaagaccgtgctgaccggcaccaaggacacagtgactactgggctcgtgggggcagtgaatgtcgccaaagggaccgtccagacaggcatggacaccaccaaaactgtcctaaccggtaccaaggacaccatctacagtggggtcaccagtgccgtgaacgtggccaagggggctgtgcaaactgggctgaaaacgacccaaaatatcgcgacaggtacaaagaacacctttggcagtggggtgaccggtgctgtgaatgtggccaaaggggccgtccagacaggtgtagacacagccaagaccgtgctgaccggcaccaaggacacagtcactactgggctcatgggggcagtgaatgtcgccaaagggactgtccagaccagtgtggacaccaccaagactgtcctaactggtaccaaggacaccgtctgcagtggggtgaccggtgctgcgaatgtggccaagggggccgtccagacgggtgtagacacggccaagaccgtgctgaccggtaccaaggacactgtctgcagtggggtcaccggtgctgtgaacgtggccaagggtgctgtgcaaactgggctgaaaacgacccaaaatatcgcaacaggtacaaagaacacccttggcagtggggtgaccggtgctgcgaatgtggccaaaggggccgtccaggggggcctggacactacaaagtctgtcctgactggcactaaagatgctgtgtccactgggctcacaggggctgtgaacttggccaaagggactgtccagaccggcatggacaccaccaagactgtgttaactggtaccaaggatgctgtgtgcagtggggtgaccggtgctgcgaatgtggccaagggggccgtccagacgggtgtagacacggccaagaccgtgctgaccggcaccaaggacacagtcactactgggctcatgggggcagtgaatgtcgccaaagggaccgtccagaccagtgtggacaccaccaagactgtcctaactggtaccaaggacaccgtctgcagtggggtgaccggtgctgcgaatgtggccaagggggccgtccaggggggcctggacactacaaagtctgtcctgactggcactaaagacaccgtatccactgggctcacaggggctgtgaacttggccaaagggactgtccagaccggcgtggacaccagcaagactgtcctgaccggtaccaaggacaccgtctgcagtggagtcactggtgccgtaaatgtggccaaaggcaccgtccagacaggtgtggacacagccaagacggtgctgagtggcgctaaggatgcagtgactactggagtcacgggggcagtgaatgtggccaaaggaaccgtgcagaccggcgtggacgcctccaaggctgtgcttatgggtaccaaggacactgtcttcagtggggttaccggtgccatgagcatggccaaaggggccgtccaggggggcctggacaccaccaagacagtgctgaccggaaccaaagacgcagtgtccgctgggctcatggggtcagggaacgtggcgacaggggccacccacactggcctcagcaccttccagaactggttacctagtacccccgccacctcctggggtggactcaccagttccaggaccacagacaatggtggggagcagactgccctgagcccccaagaggccccgttctctggcatctccacgcccccggatgtgctcagtgtaggcccggagcctgcctgggaagccgcagccactaccaagggccttgcgactgacgtggcgacgttcacccaaggggccgccccaggcagggaggacacggggcttttgaccaccacacacggccccgaagaagccccacgcttggcaatgctgcagaatgagttggaggggctgggggacatcttccaccccatgaatgcggaggagcaagctcagctggctgcctcccagcccgggccaaaggtgctgtcggcggaacaggggagctacttcgttcgtttaggtgacctgggtcccagcttccgccagcgggcatttgaacacgcggtgagccacctgcagcacggccagttccaagccagggacactctggcccagctccaggactgcttcaggctgattgaaaaggcccagcaggctccagaagggcagccacgtctggaccagggctcaggtgccagtgcggaggacgctgctgtccaggaggagcgggatgccggggttctgtccagggtctgcggccttctccggcagctgcacacggcctacagtggcctggtctccagcctccagggcctgcccgccgagctccagcagccagtggggcgggcgcggcacagcctctgtgagctctatggcatcgtggcctcagctggctctgtagaggagctgcccgcagagcggctggtgcagagccgcgagggtgtgcaccaggcttggcaggggttagagcagctgctggagggcctacagcacaatcccccgctcagctggctggtagggcccttcgccttgcccgctggcgggcagtagctgtaggagcctgcaggcccggcgcggggtcgccctgctctgtccagggaggagctgcctcagaactttctccccgcccccaaacctggatcggttccctaaagccctagacctttggggctgcagctggctgagcgccgaggggctgcggaggcagtgaccttcttaactgagccaccccacgccctgctccgggcctgcctgcatctcccacctcctccccagcgctgcctgcccctctcggagcctggggtcactcagaccaccagccaagagccttcccttgaagtccccaagcaagcactgcaattaggaaagagaaaaagcagcgtgcccagcctggaagggcatctgtttgccccgctagcaacccttttatatctagcagggctcttccagtcctgcagcacgggcccccagctatcagcggtgcaggcagtgctgtggcatcccaggctccgggcagctccgttctcatgctgaaagtgggtctccggccttagcacacacaccttgagggtcttaagaaccacattccctcatagtagaaagtactagaaaaagcgacactgccatcatcatcccaaggcaggctgctactgcctttgctgacccccggggtggcctcacggtggggacaaagctgccaggagccacagcagccacagctggggctttgcaccagcctggcttgagactgagcagtttgcagggggtggggggtgcaaaaaacaagcaaacaggctgctgctgcctccagctgcccaccacaggcctgccccaggcacctggggctctgaggcccctggggaggctgggcccagcagctgcccctggagaacacagacaaaggacttccccgcagggaactgtgccctatggagggatcagacagggctgggaacagccacagaggctgcgtgcctatggcacagcccttcctccgccgcacactccccctgggtcctcaggcccacccaagcgccgggctgcagaggaagcggggctggggaggctgcaggcatcagagacactggtggtggcggacccggccgccgggccccgtgctctcaggctagcccaggtcgtggaggctggcaggctcaggtcgggtgtgagacgtgccgtggctgcgctcagtccagcggggaggagccgttcagcccggcctccccaggaagccatatccccactcacccggtaagagaaccttgtcgtcccctttccatgctctcctaggacacgagcccaggaaccccagacccagggggaggaagggtggaggggccccaggggtcaccatgtgcaccaggggccgtgaggggccggggcattcagctcagctctgaaccggggaagctggcacggcaaggactgcctcaggtgacgggccgtgagaggggacgggtcaggagccttcccaagccttctcctcagcccgacacccatggccatcggaggctaggatgccagacacagccatttgcagaaatcaggcacagtgactgcagctcacgtccagccaaccaagcatggggccgcagctcaggaagtcccttcccgccacaccacagcctaattcttactgggacggaggcaactcggctacgctgggcaggacgacaaacacgagacgccactgtggaatgagcaacttcggagcacggggtgacttgcttgggaccgtgcccacgtgacagccccttatgcagaggaggaaagagaagccccgagtgggaggggaacctgtccaaagtcacacggtgtgtgggtgacacagctggggtgagtcgaggctggcccctgaggcccatgctccctgaacgctggagaccactgtcggctagcagcggctctcagggaaggcctggtctccaccctcccagcctagcctcgcggaccctcgtcctccccacatcggacctgctcacctgcctggaccctgggctgccagatgcaggaagcatcaaaccccccagcctcgtgggtgcggggcagggcgcaggcagcacagcttagatgccctggtttgtccctcttgtctcctgggaagagcttgctcccgcccagctctcctgccactggcctttcagggttgggctgggcccagagtgccttttagtcgcttctcacggtggcctgatggctcaacccagtcccaaacgggcccagtgacactgccgactgcgccccagctcaggcccccactgcaccagcaatgctagaaaaccaagccaataaaagtgatttcttttttcatt

SEQ ID NO: 55 - DNA, 5583 bp, Homo sapiens
atgggagcgggatcggcgcggggggcccgaggcacagcggcggcggcggcggcgcgcgggggggggtttctcttctcctggatcttagtctcgtttgcctgtcacctggcctccacccaaggagctcctgaagatgtggacatcctccagcggctgggcctcagctggacgaaggccgggagccctgcacccccgggagtcattcctttccagtcgggcttcatctttacgcagcgggcccggctccaggctcccacgggcaccgtcattcctgccgccttgggcacagagctggcactggtgctgagcctctgctcccaccgggtgaaccatgccttcctcttcgctgtccgcagccagaaacgcaagctgcagctgggcctgcagttcctccccggcaagacggtcgtccacctcgggtcccggcgctcagtggccttcgacctcgacatgcacgacgggcgctggcaccacctggccctcgagctccgaggccgcacagtcactctggtgactgcctgcgggcagcgccgggtgcctgtcctgctgcctttccacagggaccctgcactcgaccctgggggctccttcctctttgggaagatgaacccgcatgcagtccagtttgaaggtgctctctgccagttcagtatctaccctgtgacgcaggtcgctcacaattactgtacccacctgaggaagcagtgtggacaggctgacacgtaccagtccccactgggacctctcttctcccaagactctggcagaccttttaccttccagtccgacctcgccctgctaggcctggagaacttgaccactgccacaccagccctggggtcactgccagcaggcaggggacccagggggactgtggcacccgccacgcccaccaagccccaaaggactagccccacaaaccctcaccagcatatggcggtgggaggcccagcccaaaccccgctgctacctgccaagctgtcagccagtaacgcacttgatcccatgctcccagcctctgttggcggctctaccagaacgcctcgccctgcggccgctcaaccatcacagaagatcacagccaccaaaatccccaaaagcctccctaccaagccttcggccccttctacttcaattgtgcccatcaaaagcccccatcctacccagaaaacagctccatcttcatttacaaagtcagccctacccactcagaagcaagtgccacctacttcccgtccagttcctgccagagtctcccgtcccgcagagaagcccatccagaggaacccgggaatgcccaggcccccaccgcccagcacccggcccctacctcctaccaccagctcctctaaaaaacccattcccacactagctcggactgaggccaagataaccagccatgccagtaagccggcctctgcccgcaccagcacccacaaacctcccccatttactgctttatcctcatctcctgcccctactcctggttctaccaggagtactcggccaccagccacgatggtacctccaacttcgggcaccagcactcccagaacagcacctgccgtccccactcctggctcagctcccactggaagcaagaagcccattggatcggaagcctcaaagaaagccggacccaagagcagcccccggaagcctgtccccctcagacctgggaaggcagccagggatgtccccttgagcgatctgacaaccaggcctagccccagacagccccagcccagtcagcagaccaccccggccctggtattggccccggcgcaattcctgtcctccagcccccggcccacgagcagtggctattcgatcttccacctggcaggatctacgcctttccctctgctgatggggcctccgggacccaagggagactgtggcttgccgggtccccctgggctacctgggctacctggaatccctggtgcacgtgggcctcggggtcctcctgggccttatggaaatccaggtctccccggccctcctggagccaaaggacagaaaggggacccagggctctcaccaggaaaggcccacgatggggcaaagggtgacatgggcttgcctgggctctccgggaatccaggacctccgggacgaaagggacacaagggctatcctggaccggcagggcaccccggagaacaggggcagccaggacctgagggcagcccaggggccaaaggttaccctggcaggcaggggttacctggaccggtaggagatcccggccccaaaggcagcaggggctacattgggctcccagggctcttcggcctgccagggtctgatggagaacgaggcctgcctggcgttcctggcaagaggggcaagatgggtatgccggggtttcctggagtctttggggaaagaggccctcctggactggatggaaatcctggagaactgggcctgccaggcccccctggagtccccggcctcattggtgacttaggagtgttgggtccgattggctacccgggacccaagggcatgaagggactgatgggcagcgtgggggagcccggactgaaaggtgataagggtgaacaaggggttccaggtgtgtcaggagatcccggattccaaggagacaaggggagccaggggttgccagggttccccggtgcacgggggaagccagggcctctgggcaaagtcggagacaaaggatccattgggtttcccgggccccctggacccgagggattcccaggagacatcggcccccctggcgacaatggcccagaaggcatgaagggtaagcctggagcccgaggcctgccgggaccccgtgggcagctggggcccgagggagatgagggacccatggggccgccaggggcccctggcttggagggtcagcctggcaggaaggggtttcctgggaggcccggcctggatggcgtgaagggggaaccaggggatcctggtcggccggggcctgtgggagagcagggatttatgggattcattggtctggtcggggagccaggaatcgtgggagaaaagggtgatcgtggcatgatgggacccccaggcgtgcctggacccaaggggtcgatgggtcatcctggaatgccaggtggtatggggacccctggagagcctggaccccagggtcctccaggatctcgaggcccaccaggcatgaggggagcaaagggacgtcggggcccccgaggaccggacggaccagctggggagcaagggtccaggggcctgaagggccctccaggaccccagggcagaccgggccggcctggacagcagggtgtggctggtgagcgaggccacttgggctcgagaggctttcctggcatcccgggtccctcaggccccccaggcaccaagggcctcccaggagaaccgggccctcagggaccccaggggccaattgggcctccaggagagatgggacccaaggggccgcctggtgcagtgggagaaccgggccttcctggggaagccgggatgaagggtgaccttggacccctgggcactcctggggagcagggcctcattgggcaacggggagagccaggccttgagggtgacagtggccccatgggacctgatgggctgaagggggacaggggagacccagggcctgatggagaacatggcgagaaaggccaggaagggctgatgggtgaggacgggccccccggcccccctggcgtcactggtgtccggggtcctgaaggaaaatcagggaagcaaggcgagaagggccgcactggagccaagggtgccaagggctatcaaggacagctgggtgagatgggcgtccctggagaccctggaccccctggcactccaggccctaaagggtcccggggcagcctgggaccaacgggtgctccgggacgcatgggggcccaaggagaaccgggactggctggttatgatggacacaaaggcattgtgggaccccttggacctcctggaccaaaaggcgaaaagggggagcagggcgaggacggcaaggctgaggggccccctgggccacctggagatcggggccctgtgggtgatcgaggagaccgcggggaaccgggagaccctgggtaccctggacaggagggtgtgcaaggcctccgtggaaagccaggccagcagggccaacccgggcatccgggaccccgggggtggccgggacccaaaggatcgaaaggcgcagagggaccaaagggaaagcaaggcaaggcaggggccccaggccggaggggggtccagggcctgcaggggctgccagggccccggggcgtggtggggagacagggcctcgagggcatcgctggaccagatgggcttcctggcagggacgggcaagcaggacagcagggggagcagggagacgatggggaccctggccccatgggccctgctgggaagagaggaaatccaggtgtggccggcttacctggagcacagggacccccaggattcaagggtgagagtgggttacccggacagctgggtccccctggcaagcgaggaacagagggcagaacggggctccctggaaaccagggggagcctgggtccaaaggccagccgggcgactctggcgagatgggcttcccaggaatggcaggtctcttcggacccaagggcccgcctggagacattggcttcaaaggcatccagggccctcgggggccacctggcttgatgggaaaggaaggcatcgtcgggcccctcggaatcctgggaccttcgggactcccgggtccgaagggtgacaaaggcagccgtggggactggggattgcaaggtccgaggggtcctcccggccccagagggcggcccggccccccgggtcctccagggggtcctatccaattgcaacaagatgatcttggggcagctttccagacgtggatggacaccagtggagcactcaggccagagagttacagctatccagaccggctggtgctggaccagggaggagagatctttaaaaccttacactacctcagcaacctcatccagagcattaagacgcccctgggcaccaaagagaaccccgcccgggtctgcagggacctcatggactgtgagcagaagatggtggatggtacctactgggtggatccaaaccttggctgctcctctgacaccatcgaggtctcctgcaacttcactcatggtggacagacgtgtctcaagcccatcacggcctccaaggtcgagtttgccatcagccgggtccagatgaatttcctgcacctgctaagctccgaggtgacccagcacatcaccatccactgccttaacatgaccgtgtggcaggagggcactgggcagaccccagccaagcaggccgtacgcttccgggcctggaatggacagatttttgaagctgggggtcagttccggcccgaggtgtccatggatggctgcaaggtccaagatggccgctggcatcagacactcttcaccttccggacccaagacccccaacagctgcccatcatcagtgtggacaacctccctcctgcctcatcagggaagcagtaccgcctggaagttggacctgcgtgcttcctctga

SEQ ID NO: 56 - DNA, 5307 bp, Homo sapiens
gaataacagttaagttttggggagtaaaaactgtttcaatttttgactgtgttgggggttggtgctcctaatccctgtgttgttaaagggtcgactatattgtatttttgaaaattgctagagagtggacgtaaagtgttctcactaaacaaattataactatgtgaggtagtgcatatattaagtagctagatttggtcattccacaatgtatatgtacttcaaaacatcatgttgtacatgagaaacacagttttatctgttagtcagttttaaaaataaaaaatattccaactagaaactctgttgtagtttttgaaattacaacttggaggctttgaggaactgattagaagtctcctttctgtttcaggctttcatatccaaaccatagatctttagaagtaacatctgttaattaattattaataaatagtttgagtctttattaattcatggataacttgaccattttctctctccttttgcttagataatcccagatcatggccgggcacagtagctcacgcctgtattcccagcagtttgggaggccgaggcaggcagatcacttgaactcaggagtttgagaccagcttgggcaacatggcaaaaccctgtctctattaaaaatacaaaaattagctgggcatggtagtgcatgcctgtagtcccagctacctgggaggctgaggtgggaggatcgcttgagcctgggaggttgaggcttctgtgcgcgatgattgctccagtgatcacgccattgcactccagcctgggtgacagagtgagaccctgtctccaaaaaaaaaaaaaattaagcaagtagcagttacaagaccaaaagttattttcctttttttttttctctataaaattgcccatttggaccaaatctagttataacttatttcagtgtcattaagaaagttgatgaataagtcatattactcagatgttagtagctatgcatttattaatagttttatttataagtatttagtttcactctgttgcagactattttatgctaaaattagctaaagccaaattactatttcttaaaacatattttttactttttttttttttttaaatattattaggtacttcttgcaagggatatgcattagcacatactcaagaaggggaagaaaagaagcaaacttctggtacatcaaataccagaggatcaagacgaaaacctgcaatgacaactcctacaaggaggtctacacgtaacacaagagctgaaacagccagtcagtctcagagatccccaatatcagacaattctgggtgtgatgccccaggtaacagtaatccatctttaagtgttccctcttcagctgagtcagaaaagcaaacaagacaggctccaaaacggaagtctgtaagaagaggaagaaaaccacctttactgaaaaagaaacttcggagctctgtagctgcccctgaaaaatcatcttccaatgattcagtagatgaagaaacagcagaatctgacacatcacctgtgttagaaaaagagcaccaaccagatgtagacagtagtaacatttgtactgtgcagactcatgtagaaaaccagtctgctaattgcttgaaaagttgcaatgagcaaatagaagaaagtgagaagcatactgcaaattatgatacagaggaaagagtaggatcttcatcttctgagtcttgtgctcaagatcttcctgtgctagttggtgaggaaggggaagttaaaaaactcgagaatacaggtatagaggctaatgttttgtgtttggaaagtgagatttctgaaaatattcttgaaaaaggaggtgatccattggaaaagcaagaccagatatctggactttcacaatcagaggtaaagacagatgtatgtacagttcatcttccaaatgattttcctacatgtttaacatctgaaagcaaagtgtaccaacctgtatcttgtcccctaagtgacttatctgagaatgtagagtcagtggttaatgaagaaaaaataacagagagttccctagtagaaattactgaacataaagattttacactaaaaacagaggagcttatagagagccccaagttagaatcttctgagggtgaaattatacagacagtggacagacaatctgttaagagcccagaggttcaattgcttgggcatgttgaaactgaagatgtagaaataattgcaacatgtgatacttttgggaatgaagatttcaataatattcaagactctgaaaataacttactaaaaaataatcttctgaacaccaaattggaaaaatctttagaagaaaagaatgaatcgctgaccgaacatcctagatctacagagttgcctaaaacacacattgaacagattcagaagcattttagtgaggacaacaatgaaatgatacctatggagtgtgattcattttgcagtgaccaaaatgaatctgaagttgaaccatctgtaaatgctgatcttaaacaaatgaatgaaaattctgtgacacactgttctgaaaataatatgccgtcttctgatcttgcggatgaaaaggttgaaactgtttctcaaccatctgaaagcccaaaagataccatagataaaaccaaaaagcctcgtactcgaagatctagatttcattctccatctacaacttggtcacccaacaaagacactccacaagaaaagaagcggccccagtctccatctcccagaagagaaactgggaaagaaagcaggaagtctcaatcaccatctcctaagaatgagtcagccagaggccggaaaaaatcccgttctcagtccccaaaaaaggatattgcaagagaaaggaggcaatctcagtctcggtctccaaaaagggatactactagggaaagcagaagatctgaatcactgtccccaagaagagaaacttctagagagaacaaaagatctcagccaagagtgaaagattcttccccaggagaaaaatccaggtcccagagcagagaacgagaaagtgatagagatgggcagaggagagagagagaaaggagaaccagaaagtggtctaggtccagatctcattctaggtccccctcaagatgtagaacaaaaagtaagagttcatcatttggtagaattgacagagatagttactctccccggtggaagggaagatgggcaaatgatggttggagatgtccacgaggaaatgatcggtacagaaagaatgacccagagaaacagaatgaaaatacaagaaaagaaaaaaatgacatccatctagatgctgatgatccaaattctgctgacaaacatagaaatgactgtcccaattggataacagaaaaaataaactctgggcctgatccaagaaccagaaatccagaaaagttgaaagagtctcattgggaagaaaatagaaatgaaaattcaggaaattcttggaataaaaactttggttctggttgggtatctaaccgtggtagaggcagaggcaaccgtggcagaggcacttacagaagtagttttgcctataaagatcagaatgaaaatcggtggcaaaatcgaaaacccctctcagggaattcaaacagttcagggagtgaatctttcaagtttgtggaacagcaatcctataagcgaaaaagtgaacaggagttctcatttgatacaccagcagatagatctggatggacatctgcatccagctgggccgtgagaaagactttgccagcagatgtacaaaactactactcacgacgaggcagaaattcttcaggtccacagtctggatggatgaaacaagaggaggaaacatctggacaggattctagcctaaaagaccaaacaaaccagcaagttgatggttctcagctacctataaatatgatgcaaccgcaaatgaatgtaatgcagcaacaaatgaatgcacaacaccagcctatgaatatcttcccatatccagtgggtgttcatgctcctttgatgaacatccaacgcaatccatttaacattcatcctcagctacccttgcatctccacacaggagtgcccctcatgcaggtagccactcctaccagtgtatctcagggactaccaccaccaccaccccctcccccaccatcccaacaagtcaactacattgcttcacaaccagatggaaagcaattgcagggtattcctagttcttctcatgtaagtaataacatgagtacaccagttttgcctgctccgacagcagccccaggaaatacgggaatggttcagggaccaagttctggtaatacttcgtcatcaagtcacagcaaagcctctaatgctgctgtaaaattggcagaaagcaaagtaagtgttgcagtggaagccagcgcagatagctcgaagacagacaagaaattgcaaattcaagaaaaagcagcacaagaggtaaaattggccatcaagccattttaccaaaataaagatatcaccaaggaagaatataaagaaattgtacggaaagcagtagataaagtttgtcatagtaagagtggagaagtaaattctactaaagtggcaaatctggttaaagcctatgtagacaaatacaaatattcacggaaggggagccaaaagaaaactctggaagaacctgtgtctactgaaaaaaacataggctgaaatggggaacgctgtcaaggacattatcaggatatctgcaaagtgcaatttcaacatgtaccattaactgaaaatcatacataactgtgattgaaatttggttttgataaaattatttttttaacataggatatgatgttttgttctaaataaatataggtctgcactgcaacttctgtatccttccttcccctccaccctcccccacaaaattcaagggaaagtaaagggtttaaaggaatgtgcatctttactaggactgtgttatagtgtggatactggaaaatgtatagctttttgattagggcaatggagtgcataaattagaaacttctaagtgcactggttttcaaagagatatatataatgcatttattctgtcaggttaaaatataaagtatgatctttatgattttttccctctaattatagaaagttaaataatgtattaccatgaaaaatgtttctaatattaaatagaacatatcagttgcaaagttcctaatgtgtatttttaaagcacatatctgaataaattgcctagatagaaaaaaaattatcacgagtaaaatttagtgttcaaaacattgaaacactcttcacctattgtatgaccaaataaaggttatgctgcttgttacgcgaaggcc

SEQ ID NO: 57 - DNA, 2595 bp, Homo sapiens
gcggcgcaggcggccgagcgggactggctgggtcggctgggctgctggtgcgaggagccgcggggctgtgctcggcggccaaggggacagcgcgtgggtggccgaggatgctgcggggcggtagctccggcgcccctcgctggtgactgctgcgccgtgcctcacacagccgaggcgggctcggcgcacagtcgctgctccgcgctcgcgcccggcggcgctccaggtgctgacagcgcgagagagcgcggccctcaggagcaaggcgaatgtatgacaacatgtccacaatggtgtacataaaggaagacaagttggagaagcttacacaggatgaaattatttctaagacaaagcaagtaattcaggggctggaagctttgaagaatgagcacaattccattttacaaagtttgctggagacactgaagtgtttgaagaaagatgatgaaagtaatttggtggaggagaaatcaaacatgatccggaagtcactggagatgttggagctcggcctgagtgaggcacaggttatgatggctttgtcaaatcacctgaatgctgtggagtccgagaagcagaaactgcgtgcgcaggttcgtcgtctgtgccaggagaatcagtggctacgggatgaactggccaacacgcagcagaaactgcagaagagtgagcagtctgtggctcaactggaggaggagaagaagcatctggagtttatgaatcagctaaaaaaatatgatgacgacatttccccatccgaggacaaagacactgattctaccaaagagcctctggatgaccttttccccaatgatgaagacgacccagggcaaggaatccagcagcagcacagcagtgcagccgcggctgcccagcagggcggctacgagatccccgcgcggctgcggacgctccacaacctggtgatccagtacgcctcgcaggggcgctacgaggtagctgtgcccctctgcaagcaggccctggaggacctggagaagacttcaggacacgaccacccggacgtggccaccatgctcaacatcctggccttggtgtacagggatcagaataaatacaaagatgcagctaacctactgaatgatgccttggctattcgtgagaaaactttgggcaaagatcatcctgcggtggcggcgactttgaataaccttgcagtcctttatggtaaaagagggaagtacaaagaagcagagccgttgtgtaaaagagctctggaaatccgagaaaaggttttggggaaggatcaccccgatgttgccaagcagttaaataacttggccttactgtgccagaaccagggcaagtatgaagaagtagaatattattatcaaagagccctcgagatctaccagacaaaactgggacctgatgaccccaacgtggctaagacgaaaaataacctggcatcctgctatttgaaacaaggaaagttcaagcaagcagaaacactgtacaaagagattctcactcgtgcacatgaaagggagtttggttctgtagatgatgaaaataaacccatctggatgcatgctgaagaaagagaagaatgcaaaggaaagcaaaaggatgggacatcttttggagagtatggcggctggtacaaagcctgcaaagttgatagtccaactgttacaaccactctaaaaaaccttggggcactttacagacgtcaaggcaaatttgaagctgcagaaacgttagaagaagctgctatgaggtctcgtaaacagggtcttgacaatgttcacaaacagagggtggcagaagtgctcaatgaccctgagaacatggagaagcgcaggagccgtgagagcctcaacgtggacgtggtcaagtacgagagtggccctgacggaggggaggaagtgagtatgagcgtagagtggaacgggatgaggaaaatgaagctcgggctggttaactgacttgctcagcgtcccatggcctagccgcccgtgactctcacactgtctcctgcatgacgggtggcgcctcccgcagcttcccttctctctccagtgctgcccgctgtgtctagcagcctctaggatcttgtcagagctgcacctctctgtgaactggccattcctttcggtgctgctgtcctttttgggggggttcctgatttctgtatacatgtagctttgccagatatgtacttagtaatataaactgtattaataaaatccatttactgtgtaatacacgagtttaaaaattaagagcgattagctgttcactttggtaacaggtagttaagtgtcacacaaggtgttgttgcaatggcatgacggtgacctgttgacgtaactaagccttagagcaaggcatgtgccgcacgtgctccgtggtacttagagccctgggggccccgctcggactccgggtctccctaggatatgccccagtagcatttgctgtgtagtctgtgtgtgaaatttgggcattctgcttttctctactaatcttgaagtgctcagtgatttgtgtatttgtgtctttctaacttctaataaactcactccgactgaaaaaaaaaaaaaaaaaaaaaaaaaaaaaaaaaaaaaa

SEQ ID NO: 58 - DNA, 1754 bp, Homo sapiens
ggaaggtgcgtccgagccatggccgctgccaacccgtgggacccggcgtccgcgcctaacggcgctgggctagtgctaggccacttcatagcttcggggatggtcaatcaggagatgttaaacatgtctaagaaaacagtttcttgttttgtgaacttcaccagactacagcagatcacaaatattcaagctgaaatctaccagaaaaacctggaaattgaactcctgaaactagaaaaagatacagcagatgttgttcatcctttctttttggctcagaagtgtcatactctgcaaagcatgaataatcatttggaagcagtgctgaaagagaagagatcccttaggcaaagactgttgaaacccatgtgccaggaaaacttacctattgaagctgtttatcacagatatatggtacatttgctggagttggctgtgactttcattgagagattagaaacccaccttgaaacaattagaaatattcctcatttagctgcaaatctaaagaaaatgaaccaggctttagcaaagatggatatattggtgactgagacagaagaactggcagagaatatactcaagtggcgtaaacaacaaaacgaagtttcgtcttgtatccccaaaatattagctgaagaaagttatctttataaacatgatattataatgcctcctttaccttttacttctaaagttcatgtccaaactattaatgccaagtagtcatcaactttatttttgcttaattatgtgtagtcatatgaagtctatttctagttgactgtaacatgggtattaatagtctttgctgctggtaatactgaaagaacctgctttatattggagtatcaagatctcaggttcattaagaccaaactgacttttcctttgtttttcatatatttttattctacctttcagtaaaactagagaagctaaaaaagagccatgacaatttattaatataagtgaattaaccatttctcaggtgggaaattctctttttttaaaaatgtgtgtttatcgtctggtgtggtggctcacacctgtaatcctaacacttggggaggctgaggcgggcagatcacttaaacccaggagttcaagaccagcctgggtaacatggtgaaatcccatatctacaaaataaacaaaaaattagccgaccatggtggtgcatgcctgtagtcccagctattcgggaggctgaggtaagaggatcacctaagcctgtgaggtcatggttgcaatgagtcatgatcacgccactgcgctacagcctgggcgacacagtaagaccctgtctcaaaaaaaagaagtgtgtttctggccaggcacggtggctcacgcctgtaatcccagcactttgggaggcctaggtgggcagatcatgaggtcaggagttcgagaccagcctggccaacatggcgaaacacctgtctctactaaaaatacaaaaattaggccgggcgcagtggctcacacctgtaatcccaacactttgggaggccgacccagatgggtggatcacctgaggtcaggagtttgagaccagccttgacaacatggtgaaaccccatctctggtagaaatataaaaaattaaccgggcatggtggtggacgcctgtaatcccagctacttgggaggctgaggcagaataatcgcttgaacccaggaggcagaggttgcagtaagccaagatcgtgcctctgcactccaacctgggtgatggagcaagactccatctcc

SEQ ID NO: 59 - DNA, 2788 bp, Homo sapiens
ggcggcggtagcagccaggcttggcccccggcgtggagcagacgcggacccctccttcctggcggcggcggcgcgggctcagagcccggcaacgggcgggcgggcagaatgagtctgcaggtcttaaacgacaaaaatgtcagcaatgaaaaaaatacagaaaattgcgacttcctgttttcgccaccagaagttaccggaagatcgtctgttcttcgtgtgtcacagaaagaaaatgtgccacccaagaacctggccaaagctatgaaggtgacttttcagacacctctgcgggatccacagacgcacaggattctaagtcctagcatggccagcaaacttgaggctcctttcactcaggatgacacccttggactggaaaactcacacccggtctggacacagaaagagaaccaacagctcatcaaggaagtggatgccaaaactactcatggaattctacagaaaccagtggaggctgacaccgacctcctgggggatgcaagcccagcctttgggagtggcagctccagcgagtctggcccaggtgccctggctgacctggactgctcaagctcttcccagagcccaggaagttctgagaaccaaatggtgtctccaggaaaagtgtctggcagccctgagcaagccgtggaggaaaaccttagttcctattccttagacagaagagtgacacccgcctctgagaccctagaagacccttgcaggacagagtcccagcacaaagcggagactccgcacggagccgaggaagaatgcaaagcggagactccgcacggagccgaggaggaatgccggcacggtggggtctgtgctcccgcagcagtggccacttcgcctcctggtgcaatccctaaggaagcctgcggaggagcacccctgcagggtctgcctggcgaagccctgggctgccctgcgggtgtgggcacccccgtgccagcagatggcactcagacccttacctgtgcacacacctctgctcctgagagcacagccccaaccaaccacctggtggctggcagggccatgaccctgagtcctcaggaagaagtggctgcaggccaaatggccagctcctcgaggagcggacctgtaaaactagaatttgatgtatctgatggcgccaccagcaaaagggcacccccaccaaggagactgggagagaggtccggcctcaagcctcccttgaggaaagcagcagtgaggcagcaaaaggccccgcaggaggtggaggaggacgacggtaggagcggagcaggagaggacccccccatgccagcttctcggggctcttaccacctcgactgggacaaaatggatgacccaaacttcatcccgttcggaggtgacaccaagtctggttgcagtgaggcccagcccccagaaagccctgagaccaggctgggccagccagcggctgaacagttgcatgctgggcctgccacggaggagccaggtccctgtctgagccagcagctgcattcagcctcagcggaggacacgcctgtggtgcagttggcagccgagaccccaacagcagagagcaaggagagagccttgaactctgccagcacctcgcttcccacaagctgtccaggcagtgagccagtgcccacccatcagcaggggcagcctgccttggagctgaaagaggagagcttcagagaccccgctgaggttctaggcacgggcgcggaggtggattacctggagcagtttggaacttcctcgtttaaggagtcggccttgaggaagcagtccttatacctcaagttcgaccccctcctgagggacagtcctggtagaccagtgcccgtggccaccgagaccagcagcatgcacggtgcaaatgagactccctcaggacgtccgcgggaagccaagcttgtggagttcgatttcttgggagcactggacattcctgtgccaggcccacccccaggtgttcccgcgcctgggggcccacccctgtccaccggacctatagtggacctgctccagtacagccagaaggacctggatgcagtggtaaaggcgacacaggaggagaaccgggagctgaggagcaggtgtgaggagctccacgggaagaacctggaactggggaagatcatggacaggttcgaagaggttgtgtaccaggccatggaggaagttcagaagcagaaggaactttccaaagctgaaatccagaaagttctaaaagaaaaagaccaacttaccacagatctgaactccatggagaagtccttctccgacctcttcaagcgttttgagaaacagaaagaggtgatcgagggctaccgcaagaacgaagagtcactgaagaagtgcgtggaggattacctggcaaggatcacccaggagggccagaggtaccaagccctgaaggcccacgcggaggagaagctgcagctggcaaacgaggagatcgcccaggtccggagcaaggcccaggcggaagcgttggccctccaggccagcctgaggaaggagcagatgcgcatccagtcgctggagaagacagtggagcagaagactaaagagaacgaggagctgaccaggatctgcgacgacctcatctccaagatggagaagatctgacctccacggagccgctgtccccgcccccctgctcccgtctgtctgtcctgtctgattctcttaggtgtcatgttcttttttctgtcttgtcttcaactttttttaaaactagattgctttgaaaacatgactcaataaaagtttcctttcaatttaaaaaaaa

SEQ ID NO: 60 - DNA, 509 bp, Homo sapiens
gtcttcactcagaactcacaccttgcaaatcatcaaaggactcacaccggagagaaaccttaccgatgcaatgagtgtgggaaagccttcagtgttcgttcaagcctaaccacccatcaggcaatccatactgggaaaaaaccttacaaatgtaatgaatgtggcaaggtctttactcaaaatgctcacctggcaaatcaccgaagaattcatactggggagaaaccttacaggtgtacagagtgtgggaaagcctttagggtaagatcaagtctaactacccatatggcaatccacactggagaaaagcgttacaaatgtaatgagtgtggcaaggtcttcaggcagagttcaaatcttgcaagtcatcacagaatgcataccggagagaaaccttacaagtgtaatgagtgtggaaaagcctttagaggacattcaaacctaactacccatagagtgccatccctgagagaccagaccgctccccaatactctcctaaaataaacat

SEQ ID NO: 61 - DNA, 2500 bp, Homo sapiens
cggggggatcttggctgtgtgtctgcggatctgtagtggcggcggcggcggcggcggcggggaggcagcaggcgcgggagcgggcgcaggagcaggcggcggcggtggcggcggcggttagacatgaacgccgcctcggcgccggcggtgcacggagagccccttctcgcgcgcgggcggtttgtgtgattttgctaaaatgcatcaccaacagcgaatggctgccttagggacggacaaagagctgagtgatttactggatttcagtgcgatgttttcacctcctgtgagcagtgggaaaaatggaccaacttctttggcaagtggacattttactggctcaaatgtagaagacagaagtagctcagggtcctgggggaatggaggacatccaagcccgtccaggaactatggagatgggactccctatgaccacatgaccagcagggaccttgggtcacatgacaatctctctccaccttttgtcaattccagaatacaaagtaaaacagaaaggggctcatactcatcttatgggagagaatcaaacttacagggttgccaccagcagagtctccttggaggtgacatggatatgggcaacccaggaaccctttcgcccaccaaacctggttcccagtactatcagtattctagcaataatccccgaaggaggcctcttcacagtagtgccatggaggtacagacaaagaaagttcgaaaagttcctccaggtttgccatcttcagtctatgctccatcagcaagcactgccgactacaatagggactcgccaggctatccttcctccaaaccagcaaccagcactttccctagctccttcttcatgcaagatggccatcacagcagtgacccttggagctcctccagtgggatgaatcagcctggctatgcaggaatgttgggcaactcttctcatattccacagtccagcagctactgtagcctgcatccacatgaacgtttgagctatccatcacactcctcagcagacatcaattccagtcttcctccgatgtccactttccatcgtagtggtacaaaccattacagcacctcttcctgtacgcctcctgccaacgggacagacagtataatggcaaatagaggaagcggggcagccggcagctcccagactggagatgctctggggaaagcacttgcttcgatctattctccagatcacactaacaacagcttttcatcaaacccttcaactcctgttggctctcctccatctctctcagcaggcacagctgtttggtctagaaatggaggacaggcctcatcgtctcctaattatgaaggacccttacactctttgcaaagccgaattgaagatcgtttagaaagactggatgatgctattcatgttctccggaaccatgcagtgggcccatccacagctatgcctggtggtcatggggacatgcatggaatcattggaccttctcataatggagccatgggtggtctgggctcagggtatggaaccggccttctttcagccaacagacattcactcatggtggggacccatcgtgaagatggcgtggccctgagaggcagccattctcttctgccaaaccaggttccggttccacagcttcctgtccagtctgcgacttcccctgacctgaacccaccccaggacccttacagaggcatgccaccaggactacaggggcagagtgtctcctctggcagctctgagatcaaatccgatgacgagggtgatgagaacctgcaagacacgaaatcttcggaggacaagaaattagatgacgacaagaaggatatcaaatcaattactagcaataatgacgatgaggacctgacaccagagcagaaggcagagcgtgagaaggagcggaggatggccaacaatgcccgagagcgtctgcgggtccgtgacatcaacgaggctttcaaagagctcggccgcatggtgcagctccacctcaagagtgacaagccccagaccaagctcctgatcctccaccaggcggtggccgtcatcctcagtctggagcagcaagtccgagaaaggaatctgaatccgaaagctgcgtgtctgaaaagaagggaggaagagaaggtgtcctcggagcctccccctctctccttggccggcccacaccctggaatgggagacgcatcgaatcacatgggacagatgtaaaagggtccaagttgccacattgcttcattaaaacaagagaccacttccttaacagctgtattatcttaaacccacataaacacttctccttaacccccatttttgtaatataagacaagtctgagtagttatgaatcgcagacgcaagaggtttcagcattcccaattatcaaaaaacagaaaaacaaaaaaaagaaagaaaaaagtgcaacttgagggacgactttctttaacatatcattcagaatgtgcaaagcagtatgtacaggctgagacacagcccagagactgaacggc

SEQ ID NO: 62 - DNA, 2457 bp, Homo sapiens
acgacccggagcgaaggtctcgcgaggcctgggcgctgcggcggcaggaggaggacggggaaggacggagccgagccgcggctgcctccctcgctcactccctcgcgcactcgcccgccccctccctccctcccctcccttccccggccccggctctggccccggcccattcgctgttgggtcttctgctagggaggatgtcgggttcgtcgctgcccagcgccctggccctctcgctgttgctggtctctggctccctcctcccagggccaggcgccgctcagaacgctgggtttgtcaagtcgcccatgtcagaaactaagctcacgggggacgcctttgagctgtactgtgacgtggtcgggagccccacgccagagatccagtggtggtacgcagaagtcaaccgggcagagtctttcagacagctgtgggacggtgctcggaagcgccgtgtcaccgtaaacaccgcctacgggtcaaacggcgtgagtgtgctgagaataacccggctcaccttggaggactctgggacttacgagtgcagggccagcaacgaccccaagaggaatgacttgaggcaaaacccctccataacatggattcgagcccaggccaccataagcgtccttcagaagccaaggattgtcaccagtgaagaggtcattattcgagacagccctgttctccctgtcaccctgcagtgtaacctcacctccagctctcacacccttacatacagctactggacaaagaatggggtggaactgagtgccactcgtaagaatgccagcaacatggagtacaggatcaataagccgagagctgaggattcaggcgaataccactgcgtatatcactttgtcagcgctcctaaagcaaacgccaccattgaagtgaaagccgctcctgacatcactggccataaacggagtgagaacaagaatgaagggcaggatgccactatgtattgcaagtcagttggctacccccacccagactggatatggcgcaagaaggagaacgggatgcccatggacattgtcaatacctctggccgcttcttcatcatcaacaaggaaaattacactgagttgaacattgtgaacctgcagatcacggaagaccctggcgagtatgaatgtaatgccaccaacgccattggctccgcctctgttgtcactgtcctcagggtgcggagccacctggccccactctggcctttcttgggaattctggctgaaattatcatccttgtggtgatcattgttgtgtatgagaagaggaagaggccagatgaggttcctgacgatgatgaaccagctggaccaatgaaaaccaactctaccaacaatcacaaagataaaaacttgcgccagagaaacacaaattaagtactgcttacaatatctttaggttcctgaaactggtggcaacatgacctgctaaaattttctgcttggacctctttggttctctcccctttcaagtgagcaacaccacaatgactgtctaaagcatgccttatttagcctctcctgtaagggtgatctagccaggtacattttaaacaatgcttcagtgtagaaggtgtaaactattttgggcttgatgtgctgtgaatgttgcttttttttttcctttgttaaaatatttaaatagaagtgaaaaggtcctctgaggatcagatcatgcatgcgccattttttacttaatgcagctgttaaattggcaaagctctaaaatgcactgctgccatctagtgatacacttttgtaaagtacagcaaaacctacagatatatacagtatataaatatatatatatatatatttatatttttgggggtgggagaaatccaaaataaagtaaatgcttgtttcatttttaagctgctgatattcattccttattgtatgttgtcagatgaggaaattgtgcagttctggtacataaagatgagtaatataaactgaaatctataattttaagggcttaacctgtgactttaataagctggaacagtccactgaatgggtataatgaattgcagtatatacgtatgattgctttttaagtgattatcttttcttctgttaagtcatgtaaattcataaatccttttgcactgatgtgttgaaccttattcttgtacattcattcaatcaaggcaaacttttataatttttcttttgtttccaatgaccttgaaatgttatagcatggtaatattctatgcaactatagttatactttttggtttgacactgtattttttcacattgatttactggttgatgatagattttataacctaacggttctcatgcggtgcgtaattgtagatgcatgtacttgtgtgttttgtgtaattattgaagtgcaatgatgtataaaaaagtggattcacctgtttttaaaaataaaacattgataaaaggaaaaaaaaaaaaaaaa

SEQ ID NO: 63 - DNA, 3697 bp, Homo sapiens
cccacgcgtccgggcagcagcgttggcccggccccgggagcggagagcgaggggaggcggagacggaggaaggtctgaggagcagcttcagtccccgccgagccgccaccgcaggtcgaggacggtcggactcccgcggcgggaggagcctgttcccctgagggtatttgaagtataccatacaactgttttgaaaatccagcgtggacaatggctactcaagctgatttgatggagttggacatggccatggaaccagacagaaaagcggctgttagtcactggcagcaacagtcttacctggactctggaatccattctggtgccactaccacagctccttctctgagtggtaaaggcaatcctgaggaagaggatgtggatacctcccaagtcctgtatgagtgggaacagggattttctcagtccttcactcaagaacaagtagctgatattgatggacagtatgcaatgactcgagctcagagggtacgagctgctatgttccctgagacattagatgagggcatgcagatcccatctacacagtttgatgctgctcatcccactaatgtccagcgtttggctgaaccatcacagatgctgaaacatgcagttgtaaacttgattaactatcaagatgatgcagaacttgccacacgtgcaatccctgaactgacaaaactgctaaatgacgaggaccaggtggtggttaataaggctgcagttatggtccatcagctttctaaaaaggaagcttccagacacgctatcatgcgttctcctcagatggtgtctgctattgtacgtaccatgcagaatacaaatgatgtagaaacagctcgttgtaccgctgggaccttgcataacctttcccatcatcgtgagggcttactggccatctttaagtctggaggcattcctgccctggtgaaaatgcttggttcaccagtggattctgtgttgttttatgccattacaactctccacaaccttttattacatcaagaaggagctaaaatggcagtgcgtttagctggtgggctgcagaaaatggttgccttgctcaacaaaacaaatgttaaattcttggctattacgacagactgccttcaaattttagcttatggcaaccaagaaagcaagctcatcatactggctagtggtggaccccaagctttagtaaatataatgaggacctatacttacgaaaaactactgtggaccacaagcagagtgctgaaggtgctatctgtctgctctagtaataagccggctattgtagaagctggtggaatgcaagctttaggacttcacctgacagatccaagtcaacgtcttgttcagaactgtctttggactctcaggaatctttcagatgctgcaactaaacaggaagggatggaaggtctccttgggactcttgttcagcttctgggttcagatgatataaatgtggtcacctgtgcagctggaattctttctaacctcacttgcaataattataagaacaagatgatggtctgccaagtgggtggtatagaggctcttgtgcgtactgtccttcgggctggtgacagggaagacatcactgagcctgccatctgtgctcttcgtcatctgaccagccgacaccaagaagcagagatggcccagaatgcagttcgccttcactatggactaccagttgtggttaagctcttacacccaccatcccactggcctctgataaaggctactgttggattgattcgaaatcttgccctttgtcccgcaaatcatgcacctttgcgtgagcagggtgccattccacgactagttcagttgcttgttcgtgcacatcaggatacccagcgccgtacgtccatgggtgggacacagcagcaatttgtggagggggtccgcatggaagaaatagttgaaggttgtaccggagcccttcacatcctagctcgggatgttcacaaccgaattgttatcagaggactaaataccattccattgtttgtgcagctgctttattctcccattgaaaacatccaaagagtagctgcaggggtcctctgtgaacttgctcaggacaaggaagctgcagaagctattgaagctgagggagccacagctcctctgacagagttacttcactctaggaatgaaggtgtggcgacatatgcagctgctgttttgttccgaatgtctgaggacaagccacaagattacaagaaacggctttcagttgagctgaccagctctctcttcagaacagagccaatggcttggaatgagactgctgatcttggacttgatattggtgcccagggagaaccccttggatatcgccaggatgatcctagctatcgttcttttcactctggtggatatggccaggatgccttgggtatggaccccatgatggaacatgagatgggtggccaccaccctggtgctgactatccagttgatgggctgccagatctggggcatgcccaggacctcatggatgggctgcctccaggtgacagcaatcagctggcctggtttgatactgacctgtaaatcatcctttaggtaagaagttttaaaaagccagtttgggtaaaatacttttactctgcctacagaacttcagaaagacttggttggtagggtgggagtggtttaggctatttgtaaatctgccacaaaaacaggtatatactttgaaaggagatgtcttggaacattggaatgttctcagatttctggttgttatgtgatcatgtgtggaagttattaactttaatgttttttgccacagcttttgcaacttaatactcaaatgagtaacatttgctgttttaaacattaatagcagcctttctctctttatacagctgtattgtctgaacttgcattgtgattggcctgtagagttgctgagagggctcgaggggtgggctggtatctcagaaagtgcctgacacactaaccaagctgagtttcctatgggaacaattgaagtaaactttttgttctggtcctttttggtcgaggagtaacaatacaaatggattttgggagtgactcaagaagtgaagaatgcacaagaatggatcacaagatggaatttagcaaaccctagccttgcttgttaaaattttttttttttttttttaagaatatctgtaatggtactgactttgcttgctttgaagtagctcttttttttttttttttttttttttttttgcagtaactgttttttaagtctctcgtagtgttaagttatagtgaatactgctacagcaatttctaatttttaagaattgagtaatggtgtagaacactaattaattcataatcactctaattaattgtaatctgaataaagtgtaacaattgtgtagcctttttgtataaaatagacaaatagaaaatggtccaattagtttcctttttaatatgcttaaaataagcaggtggatctatttcatgtttttgatcaaaaactatttgggatatgtatgggtagggtaaatcagtaagaggtgttatttggaaccttgttttggacagtttaccagttgccttttatcccaaagttgttgtaacctgctgtgatacgatgcttcaagagaaaatgcggttataaaaaatggttcagaattaaacttttaattcattcaaaaaaaaaaaaaaaaaaaaaaaaaaaaaaaaa

SEQ ID NO: 64 - DNA, 1483 bp, Homo sapiens
cttagtggtgtcggggtctagtggacagagaagactcttggccaggcagatggcttctcggtggcagaacatggggacctccgtgcgccggagatctctccagcaccaggagcagctggaggacagcaaggagctgcagcctgtggtcagccatcaggagacctctgtaggggccctggggtccctgtgcagacagttccaaaggaggctgcccctgagaaccgtcaacctcaacctccgcgcagggccctcctggaaacgcctggaaaccccagagccaggtcagcagggcctccaggctgcagctcgctcagctaagagtgctttgggtgccgtgtcccagagaatccaggagtcctgccaaagtggcaccaagtggctggtggagacccaggtgaaggccaggaggcggaagagaggagcacagaagggcagtggatccccaactcacagcctgagccagaagagcacccggctgtctggagccgcccctgcccactcagccgcagacccctgggagaaggagcatcaccgcctctctgtccggatgggctcacatgcccacccattacggcgatcaaggcgggaggctgccttccggagcccctactcctcaacagagcccctctgctctcccagcgagtctgacagtgacctagagcctgtgggggcgggaattcagcatctccagaagctgtcccaagagctagatgaagccattatggcggaagagagtggtgacatcgtctctctcattcatgactgaggaagtgcctgcaggaaacaagccctgtctgaccgccaaggcttcatactcaaggatgtctatgcttccccgtgtgcttcctggaaaaaacccccgggagtcgtcagtacccctgggccactgctaacaagcacctaacaaggggcccagagccccctgctccagccacatctggacccatcagtgactgcctgccatagcctgagagtgtcttggggagaccttgcagagggggagaattgttccttctgctttcctaggggactcttgagcttagaaactcatcgtacacttgaccttgagccttctatttgcctcatctataacatgaagtgctagcatcagatatttgagagctcttagctctgtacccgggtgcctggtttttggggagtcatccgcagagtcactcacccactgtgtttctggtgccaaggctcttgagggccccactctcatccctcctttccctaccagggactcggaggaaggcataggagatatttccaggcttacgaccctgggctcacgggtacctatttatatgctcagtgcagagcactgtggatgtgccaggaggggtagccctgttcaagagcaatttctgccctttgtaaattatttaagaaacctgctttgtcattttattagaaagaaaccagcatgtgactttcctagataacactgctttctcataataaagactatttgcatttg

SEQ ID NO: 65 - DNA, 1448 bp, Homo sapiens
gcacaccatgtgtccctccgcgcgcagcacgggggacttttcggtggggattttgggcgccgaccagacgcggcattttcggaaaatagcgccctgtgcagctgaagcgctttgtgtgtagcggggccgcgtcagcccggccgggtacgaggcgcctcgggtccccgcaccacctcctgctgccttcccgtcgccgctcccgaagcttttccagatgtccctggtagatttgggaaagaagcttttagaagcggcacgagcaggtcaagatgatgaagttcgtattttgatggcaaatggagctccctttactacagactggctgggaacttctccacttcatctagcagcacagtatggtcattattccaccacagaggtactgctgcgagctggtgtgagcagagatgccagaaccaaagtggaccgaacaccattacatatggcagcttctgagggccatgccagcatagtagaggttttacttaagcatggtgctgatgtcaatgcaaaggacatgttaaagatgacagctctccattgggccacagaacacaatcatcaagaggtggtggaacttttaatcaaatatggtgctgatgtacacacgcaaagtaaattttgtaaaactgcatttgatatttcaatagacaatggaaatgaagatttagcagagatattacagattgctatgcagaaccaaatcaacacaaacccagagagtcctgacactgtgacaatacatgctgcaacaccacagtttatcattggacctggaggggtggtgaacctaacaggtctggtatcttcagaaaattcatccaaggcaacagatgaaacgggtgtatctgctgttcagtttggaaactcttctacatcagtattagctacattagctgccttagctgaagcatctgctccattgtccaattcttcagaaactccagtagtggccacagaagaagtagttactgcagaatctgtggatggtgccattcagcaagtagttagttcagggggtcagcaagtcatcacaatagttacagatggaattcagcttggaaatttgcactctattccaaccagtggaattggtcagcccatcattgtgaccatgccagatggacaacaagtattaacagtaccagcaacagacattgctgaagaaactgttataagtgaagaaccaccagctaagagacaatgtatcgaaataattgaaaaccgggtggaatctgcagaaatagaagtaaggagtcttttacccggtgtgctttgccgcagtcatccaaaataaattcaattttttttgtcttttatatttattactgacagtattgttttgatacagaatgaaagtgcgtagtattttcattttgtttatttttgccttatacatatagcaagccctcaataaataaatattgaatgaatgaaaaaaaaaaaaa

SEQ ID NO: 66 - DNA, 11579 bp, Homo sapiens
gcggccgccaggtgctcctggagtgcagcgcctatcgccggggcgtgtgggggccacaccgagcaccagcttctccgacgccgggaagccgctgtcgccgccgctacctctccctgttgccgccgcctcagatctcttcatgccgctgtaagctcggaggccaaggatgcggagtaggcttcccccagcgcttgccgccctgggcgcggccctgctcctgtcttccattgaggcagaagttgacccaccttcagacttgaattttaaaattatagatgaaaatactgttcatatgtcatgggcaaaaccagttgatccaattgtgggttacagaataacggtggaccctacaacggatgggcctactaaagaatttaccctttcagctagtaccactgaaactttattgtcagaacttgtacctgaaacagagtatgtggtgacaataacttcatatgatgaagtagaagaaagtgtaccagttataggacaactaacaattcaaacaggtagttcgacaaagccagtggagaagaaacctggaaaaaccgagatacaaaaatgctctgtcagtgcctggactgatttggttttcctcgtggatggctcttggagtgtgggaagaaataatttcaagtacattttagacttcattgctgctcttgtgtctgcttttgacattggggaagagaagacaagagttggagttgttcaatacagctctgataccaggactgaatttaacttaaatcagtactaccaaagggatgaacttcttgctgcaataaaaaaaattccatataaaggtggcaacacaatgacaggggatgccattgattatttagttaaaaatactttcacggaatctgctggggcaagagttggctttcctaaagtggcaattattattacggatggaaaatcccaggatgaagtggaaattccagcaagagagcttcgtaatgttggagttgaagttttctccttgggcattaaagctgcagatgcaaaagaactcaaacaaattgcctccacaccttcactgaaccatgttttcaatgtggccaactttgatgcaattgtggatattcagaatgagatcatctcccaggtgtgctcaggtgttgatgaacaacttggtgaattggttagtggagaagaagttgttgagcctccttcaaatttgattgccatggaagtctcttcaaaatatgttaagctaaattggaatccatctcctagtccagtgactggctacaaagtcatcctcacaccaatgactgcaggaagccgacagcacgctctgagtgtggggcctcagacaaccacgctcagtgttcgcgacctctcagcagacacagaataccagatcagtgtttccgccatgaagggaatgacatccagtgaacccatttcaataatggagaagactcagccaatgaaagttcaagtggaatgctcacgtggtgtggatataaaagccgatattgtgtttttggttgatggctcctatagcattgggattgcaaactttgttaaagttagagcctttttggaagttcttgtaaaaagttttgaaatttcaccaaatagggtccagattagtcttgtgcaatacagccgggatcctcatactgagttcactttgaaaaaattcaccaaagttgaagatataattgaagcaataaacaccttcccttacagaggaggatctacaaatactggcaaagcaatgacttatgtcagagagaaaatatttgtgcctagcaagggatcaagaagcaatgtgccaaaggtcatgattcttatcacggatgggaaatcatcagatgctttcagagatcctgcgataaaactgaggaattcagatgttgaaatctttgcagttggtgtgaaggatgccgttcgctcagaattggaagctattgcctctcctcctgcagagacccatgtgttcacagtggaagattttgatgcttttcagaggatatcttttgaactcacacagtctatctgccttagaattgagcaagaattggcagctataaagaagaaagcttacgtccctccaaaggatcttagtttttcagaagtgacttcttatggtttcaaaaccaactggtctccagctggagaaaatgttttttcatatcacatcacctacaaggaagcggctggggatgatgaggtcactgtggtggagccagcatcgagcaccagtgttgttctcagcagcctgaagccagagaccttgtatttggtcaatgtgactgcggagtatgaggatggcttcagcattcccttagctggagaggagaccaccgaagaagtaaaaggagcacctcgaaacctaaaggtgacagatgagactacagatagtttcaaaattacttggactcaagctccagggagagttttaagatatcgaattatatatagaccagttgctggtggagagagcagagaagttaccaccccacccaatcagaggaggagaacactggagaacttgattccagacacgaaatatgaagtatctgtaattcctgaatatttctcaggacctggtactccattaactggaaatgcagccactgaagaagttagagggaatccaagagacttaagagtttctgaccctacgacgtctactatgaaattatcttggagtggggcaccaggaaaagtgaaacagtatctcgtcacatataccccagtggcagggggtgaaactcaagaggtcactgtgaggggagatacaaccaatacggtgctgcagggattgaaggaagggacacaatacgccttatctgtgacagccttgtatgcgtctggggctggagacgccctctttggtgaaggaacaacacttgaagaacgtggttctcctcaagatttagttactaaagacatcactgacacatcaattggggcttattggacatctgctccaggaatggttcgcggttacagggtctcatggaaatcactttatgatgatgttgacactggagagaaaaatctgcctgaagatgcaattcatacgatgatagaaaatctgcagccagagaccaaatacagaatttcagtatttgccacttacagcagtggagaaggagaacctttgactggagatgccacaactgaattatctcaagattccaaaaccctgaaagtagatgaagaaacagaaaacacaatgagagttacatggaaaccagcaccagggaaagtcgtcaactaccgtgttgtctatcgccctcatgggagagggaagcaaatggttgctaaggtgccccccacagtcacttcgacagtgttaaagcgacttcagccacagaccacatatgacatcacagttcttcctatttacaagatgggagaaggaaagcttaggcaaggatcaggaacaacagcttctcggtttaagtctcctagaaacctcaaaacatctgacccaaccatgtcaagcttccgagtgacttgggagcctgcccctggggaagtgaagggttataaagtcacattccaccctacgggggatgacagaagactgggggagttagtggttggaccctatgacaacacagttgttttggaggaacttagggctggtaccacctataaagtaaatgtttttggaatgtttgatggaggagaaagctcaccacttgttggacaagaaatgacaaccctttccgacacaactgttatgccaattttatcttctgggatggagtgtctcaccagagctgaggcagacattgtgttgctggtggatggatcatggagcatcggccgggcaaattttagaaccgtgaggagtttcatttctcgtattgtggaagtctttgacattggccccaaaagagtacaaattgctcttgctcagtatagtggggatcccagaacagagtggcagttaaatgcacacagagacaagaagagcttgttgcaagctgtggcaaacttgccgtacaaaggaggcaatactctcacaggcatggctttgaatttcattcgccaacagaacttcaggacccaagctggcatgagacctcgagctcgaaaaattggtgtgctcattactgatggaaaatcacaagacgatgttgaagcaccttcaaagaaactcaaggatgagggagtggagctgtttgctattggtattaaaaatgctgatgaagtcgaattaaagatgattgcaactgatcctgatgatacccatgcatacaatgtggcagattttgagtcactctccaggatagtggatgatctcaccattaatttgtgtaacagtgtcaaaggtccaggtgatttggaagcaccttctaacttagttatttctgagcgaacccatcgttcttttagagtgagctggacaccaccttctgacagtgtggatcgatataaggtggaatactatccagtttctggagggaaacgtcaagaattttatgtgagtcgaatggaaactagcacagtgctgaaagatctgaaacctgaaactgaatatgttgtcaatgtgtattctgtggtagaagatgaatatagtgagcctctgaaggggacagaaaaaaccttgccagtgcctgtagtcagcctgaatatttatgatgttggccctaccaccatgcatgtgcagtggcagcctgtgggaggagctactggctacatcttgtcatacaaacctgttaaggacacagagccaacaagacccaaagaggtgcgtttggggccaacagtgaatgacatgcagctgactgaccttgttcccaacacggagtatgcagtcacagtccaggctgtcctgcacgacctcactagtgaacctgtcactgttcgggaagtcaccttgcctttacccagacctcaggatctgaaactcagagatgtgactcacagcactatgaatgtcttttgggaacctgtgcctggaaaagtgcgtaaatatattgttcgatacaaaacaccagaagaggatgtcaaagaggtagaggtggacagatcagagaccagcacttccctcaaagacctcttctcacagaccttgtacacagtcagcgtttctgcagtacatgacgagggggagtctcctccagtgactgctcaagaaactacccgacccgtgccagccccaacaaacttaaagattactgaagtaacatcagagggtttcagagggacttgggatcatggagcttcagatgtgtctctctacagaataacttgggcaccttttggaagctcagataagatggagaccatcttaaatggagatgaaaacactttggtgttcgaaaacctgaaccccaacaccatctatgaagtttccattactgccatctatcctgatgagtcagaaagtgatgacctgattggcagtgagcgcacactgcctatcttaacaacacaagctcccaaaagtggcccacgaaaccttcaagtgtacaatgcaacatctaacagcctgactgttaagtgggatcctgctagtggtcgtgtgcagaaatataggatcacttatcagccttccacaggggaaggcaatgagcaaacgaccacaataggaggacggcagaacagtgtggtcctgcagaaactgaagccagacactccttacactatcaccgtatcctctctgtatcctgatggtgaaggaggtcggatgacgggaagaggcaagaccaaacctctaaacactgtaaggaacctgagagtgtatgacccttctaccagcaccttgaatgtccgctgggaccatgcagagggaaatcctcgtcagtacaagctcttctatgcaccagcagcaggtggtccagaggaactggtaccaatccccgggaataccaattatgccattcttaggaatctgcagccagatacctcatacactgtgactgtagttcccgtttatactgaaggtgatgggggacgcacatcagatactggaaggacattgatgagaggactggcaagaaatgtccaagtatacaatcctacacctaacagcctcgatgttcgctgggaccctgctccaggacctgtgctgcaatatcgcgttgtgtattctcctgtggatggcacaagaccctcagaatctatagtagtgccaggaaacacgcgcatggtgcatctggagcggctgattccggacacactctattccgtgaaccttgtggctctgtactcggatggagagggaaatcccagccctgcccagggccgaacgctaccacgcagtggaccaaggaacctgagagtctttggtgaaacaaccaatagcctctcggtagcctgggatcatgctgatgggccagttcagcagtacaggatcatctattctcccactgttggtgatccaattgatgaatataccacagtcccaggcagaagaaacaatgtaatactgcagcccctgcaacctgacactccatataaaattactgttattgctgtttatgaagatggagatggtggccatctaacaggaaatggaagaactgtgggactccttcctcctcagaacatacacatctctgacgaatggtatacaagattcagggtgtcctgggatccttcaccttctccagttcttggatataaaatagtatataagccagtgggttccaatgagcccatggaagcctttgttggagaaatgacatcatataccttacacaatctcaatcccagcaccacctacgatgtgaatgtttatgctcaatatgattctggactcagtgtccccttgacagatcaaggcactacattatatttaaatgtaacagatctgaaaacttaccagattgggtgggatacattctgtgtcaaatggtcacctcaccgggcagccacctcctacaggctaaaactaagccctgcagatggaacaaggggacaagaaattacagtgcgtggatcagaaaccagtcactgcttcactggcctttcaccagacactgattatggtgtcactgtttttgtgcagacaccaaatctcgagggaccaggagtctctgttaaagaacataccactgtgaaaccaacagaagcccctacagagccacccacacctcctccccctcccaccattccaccagcccgggatgtatgcaaaggggccaaggcagatattgtgttcttgactgatgcctcctggagcattggggacgataattttaacaaagttgtaaaattcatcttcaatactgtgggaggctttgatgaaatcagtcctgctgggattcaggtttcatttgtgcaatacagcgatgaggtcaagtctgagttcaagctgaacacgtacaatgacaaggccctagcccttggggccctccagaatattaggtacagaggaggaaacacaagaacaggcaaggccctcacgtttatcaaggagaaagtcttgacttgggagagcggcatgaggaagaatgtccctaaggtgttggttgtggtcacggacggtcggtcccaggatgaggtcaagaaggcggctttggtcatccagcagtcagggttcagtgtctttgtagttggtgtggctgatgtcgactacaatgagcttgccaacattgccagcaaaccaagtgaacggcacgtgttcattgtggacgactttgaatcttttgagaagatcgaagacaatcttattacatttgtttgtgaaactgccacttcaagttgtcctctcatttatttggatggctacacctcaccaggttttaaaatgcttgaagcatacaacctgacagaaaagaattttgcttctgtacaaggagtatctttggagtcagggtctttccccagctactcagcatacaggattcagaagaatgcgtttgtgaatcagcctacagcagacctacacccaaatggactccctccttcatacacgattatattattattcagacttctcccagaaactcccagtgacccttttgcaatttggcaaatcacagacagagactacaaaccacaagttggagtgattgcagatccttctagcaagacgttatcattctttaacaaggatacaagaggcgaggtgcaaactgttacatttgacacagaagaagtaaagacattattttatggaagttttcacaaggttcatattgtagtgacctcaaaaagtgttaagatttacattgactgctatgaaattatagaaaaagacatcaaggaagctggaaatataacaactgatggttatgaaattcttggaaaactccttaaaggggaaaggaaatcagccgcattccaaatccagagttttgacattgtctgcagtccagtgtggaccagtagagacagatgctgtgatattccctctaggagagatgagggaaaatgccctgcttttccaaattcttgcacatgtacacaggacagcgttggacctccaggacctccaggccctgcaggaggacctggtgctaaaggtcccagaggtgaaagaggtatcagtggggcaattgggccccctggtcctcgtggagacataggtcctccaggcccccagggtcctccaggccctcagggacccaatggactctctattccgggagagcaaggtcgccaagggatgaaaggtgatgctggagagccaggacttccaggccgaacaggaaccccaggattacctggcccaccaggaccaatgggacctccaggagacagaggcttcactggaaaagacggtgcaatgggacccaggggcccaccagggccgccgggaagcccaggctccccaggagtcacaggaccaagtgggaagccaggaaaacctggagatcatggcagaccaggtccatctgggttgaaaggagaaaaaggtgataggggagacattgcttcccagaacatgatgcgagcagttgcaagacaagtctgtgaacaattgataagtggtcagatgaacagattcaatcagatgctgaatcagattccaaatgattaccagtccagtcgcaaccagccaggcccgccgggtccaccgggacctcctggtagcgcaggagccagaggagaacctgggcctggggggcggccaggcttcccgggcacaccagggatgcagggaccccctggggaacgaggtttgccaggagagaaaggtgaaaggggtactggatcttcaggacctcgggggctgcctggccccccaggtccacaaggagaatccagaacaggtccaccagggtccacaggttcaagaggtccccctggcccccctggccgtcctggaaactcaggtatccgaggacccccaggtcctcctggatactgtgattcttctcagtgtgccagcatcccatacaacgggcaaggctatccaggttccggctaacacattttctaagtcgccagtgctgcttacagtttgaatacatgaaaatcctgtttctgagatgtttgcgcacgtgcttattaggaaatgagtctgtatggaaatctcaccacagataatggttaacgaaccgggtcgacatcacaaaggagggtggagactctttttactaacttgaatgagacaaaagcagtggtgtcagtttataatcctgatgcatttcagtaataatgtagaaaaacattattttaaaaaagttccaacacacagccatgaggagcctcagttttgaaagaggtgcataataaaactactaaccagaggagtctatgccattttaagaaaaacaattaacctggttaaagagaaatgtcttatgtaaataataaactaattgtggcttgtaaatgatttgtatgtgatcctgtcgactaaaatcacttaacaattctacaataagcttctgcatcaaagcctgccgcttgctctatgccggaataacaccaaatggaatctcctcatctcttgcttgttagcgatgtgtctgattcagggcatctgtctttttgttacttttttgtccgtgtcctctcatttgggttttgtaactgcaattttcaaaccaaagtttaaaatcaccttttcttcctgttttgctgtagtcactggtgttcctcacccaccagctgtaactcagtttgtgtgaggtacagccacagaagatgtcatgtactgtatattacctggtgatagttgcttttcaccccccgagttcagtttctaggagccaatgaaacttcccctcacctcctcatctttccaagttgttctttgaattgaggagtttgaaggcataaacagttacttggggatttgcgaaaatcctacttagttactgcgtttacagttctttggcccagtctctgacccttcccaagtatttgtgcaatgattgtgtttactgctggatttttgaaggtttttttttttaagaaagtgccatttcattatttgattatcaccaaattatctggaaataattgggacattgtaacttatctatttatagttatgagattaagactggagtgccatcaccgcgggtgatgatttagcttttgctgtgtgtgtgtgtgtgtgccttccaaatcatgccataattgtaatgttgaatcggacagagccttacgtgcccgagggcggggcctacctgcctgagcgcgagcccttcatcgtgccggtggagcccgagcggacagcggaatacgaggactacggcgcagacgagcctgcagaggagcctcctgagccccaccggcgctggcggcgcgccctgccccacggacccgggcagtgaaccagagatcacgcgccgcgccgcgaggcttgggggaggtgttgaaattctcatttacaggtcagatagagcagtgtacgtcttttctgaggtgtttcttccagcgttgctcatccaggagtaccctttctgattgtagagaaccttgtttctgcaggaagcctagctccaagcacgcagtctgtagacatttttgcctttgcccttgaaatgcttgcaaaatactttgttaacaaaagctgcaaagagagaacatgccgtgtgcctttagttagcacagcgggcagcctcagtgaaactcttaggttaagcagttaagtcctggaacccagagctgctgtgtatttcgagcgggcagtttatcttttgctatacttattttcaattcaattacaccacgattcaaataattcccctcctaaaaccaaaaaggagggaaacgtcaactccattgcaattacttatcttcctcttctatctctgttatacgccggggcatagaatgctcgtatacatctctttaacaaccacaaaccttaagccatgtagatgaagttagtgcatcaacgggatacagttccatattgccttaaacctccttgttttagacacactaacatttataccaaattgcagattattctgcagagagggaattgcatgtttgtgttgtatatttagtatgaacttttttcagaatataatatttcttagttatcaaaagtagttggaaaacatttgcaagactatgaacatagaattgctgcttttatattttaactgcagattgtgaatttcactgccttatattatttatttctgaaacaaaagaggcatttttcaataaaactactgaaaatttga

SEQ ID NO: 67 - DNA, 1545 bp, Homo sapiens
gtagtgcctggccccagccccaggcagccacagcaggctgccttaccccagaagcagctggtggcgcctgacctcacgatgaccaggtgtgctctgctgttgctgatggtcctgatgttgggcagagtcctggttgtcccagtgacccctatcccaaccttccagctccgccctcagaattctccccagaccactccccgacctgcggcctcagagagcccctcagctgctcccacatggccgtgggctgcccagagccactgcagccccacccgccaccctggctcgcgcattgtcctatcgctggatgtccccatcggcctcttgcagatcttactggagcaagcccgggccagggctgccagggagcaggccaccaccaacgcccgcatcctggcccgtgtcggccactgctgagcctgagagagggggtcacagtgatagggccaccctggatgggaagacctggagggcagccacacagctggacggatgctgccacatctgggcatacagtgtctggacgctgccacatctgggcatacagtgtctggacactgccacatggagccactgtcatgcaggtcatatcagatctgagtgccccacagagtcacagtgtgtctggacagcctggacattggacattgctaagttgggtcactgccacatggagtcttgccatgcctgtgtgccccacagacctaatatatgtccggacagcttggatgctgccacgtaaggtcactgctgtggcgagtcttgctatgtctgggtgccccatagtcacagaacacctggacaccgccacatgcagtcatcatcatgttactttcaggagcctcaacacgagagctcaacactgcctccgaccagtccctctgaggcccacaggtctgtcatcccataggccaccacacagagaaatgctggctgagggtcacttgcttgctctgtgccccatgaggcagcacctgccccagatggacggggctgtgaggggtgtctccaggcacaaaggcccgaacacaggaagcctgtgaccatggcagccttgtcttatgggcgcatatgtgcgtgtgtggctgagtctctgacagctgtgagtgtgtgtgagcagggtaagggtacgtgaggggtctgagaggagtgggtgcttgtcccccaaacctgcatgaagcaagaacaactcctggccaggccctgtcctccccacgtacccctgcatccccagcctcgacccagggacatgcagggctcacaggagacagggctcaggctgccggagctccaaccaaactctgtcccacttcacgcacggactgtcctgggcaaaggtgttcacctttccgagcctcggtttccttatctgtaaagcaaagcgacaccagcaagcctgtgagcattgtgtatatagcagacatggaggtcctgcagcaggaggtgctcaataaacacaaagcgactgaaggatgggaccagcaaaaaaaaaaaaaaaaaaaaaaaaaaaaaaaaaaaaaaaaaaaaaaaaaaaaaaaaaaaaaa

SEQ ID NO: 68 - DNA, 2500 bp, Homo sapiens; identical to SEQ ID NO: 61

SEQ ID NO: 69 - DNA, 2882 bp, Homo sapiens
ggtggcctctgcggctaggccggctcgagactcccgggcgccgaggcgctgccgcccgcctcgccgccccacgccgaaggaccacgcgcccgccgccgccagcctctcagcgctcccatgatcgcccggtgccttttggctgtgcgaagcctccgcagagttggtggttccaggattttactcagaatgacgttaggaagagaagtgatgtctcctcttcaggcaatgtcttcctatactgtggctggcagaaatgttttaagatgggatctttcaccagagcaaattaaaacaagaactgaggagctcattgtgcagaccaaacaggtgtacgatgctgttggaatgctcggtattgaggaagtaacttacgagaactgtctgcaggcactggcagatgtagaagtaaagtatatagtggaaaggaccatgctagactttccccagcatgtatcctctgacaaagaagtacgagcagcaagtacagaagcagacaaaagactttctcgttttgatattgagatgagcatgagaggagatatatttgagagaattgttcatttacaggaaacctgtgatctggggaagataaaacctgaggccagacgatacttggaaaagtcaattaaaatggggaaaagaaatgggctccatcttcctgaacaagtacagaatgaaatcaaatcaatgaagaaaagaatgagtgagctatgtattgattttaacaaaaacctcaatgaggatgataccttccttgtattttccaaggctgaacttggtgctcttcctgatgatttcattgacagtttagaaaagacagatgatgacaagtataaaattaccttaaaatatccacactatttccctgtcatgaagaaatgttgtatccctgaaaccagaagaaggatggaaatggcttttaatacaaggtgcaaagaggaaaacaccataattttgcagcagctactcccactgcgaaccaaggtggccaaactactcggttatagcacacatgctgacttcgtccttgaaatgaacactgcaaagagcacaagccgcgtaacagcctttctagatgatttaagccagaagttaaaacccttgggtgaagcagaacgagagtttattttgaatttgaagaaaaaggaatgcaaagacaggggttttgaatatgatgggaaaatcaatgcctgggatctatattactacatgactcagacagaggaactcaagtattccatagaccaagagttcctcaaggaatacttcccaattgaggtggtcactgaaggcttgctgaacacctaccaggagttgttgggactttcatttgaacaaatgacagatgctcatgtttggaacaagagtgttacactttatactgtgaaggataaagctacaggagaagtattgggacagttctatttggacctctatccaagggaaggaaaatacaatcatgcggcctgcttcggtctccagcctggctgccttctgcctgatggaagccggatgatggcagtggctgccctcgtggtgaacttctcacagccagtggcaggtcgtccctctctcctgagacacgacgaggtgaggacttactttcatgagtttggtcacgtgatgcatcagatttgtgcacagactgattttgcacgatttagcggaacaaatgtggaaactgactttgtagaggtgccatcgcaaatgcttgaaaattgggtgtgggacgtcgattccctccgaagattgtcaaaacattataaagatggaagccctattgcagacgatctgcttgaaaaacttgttgcttctaggctggtcaacacaggtcttctgaccctgcgccagattgttttgagcaaagttgatcagtctcttcataccaacacatcgctggatgctgcaagtgaatatgccaaatactgctcagaaatattaggagttgcagctactccaggcacaaatatgccagctacctttggacatttggcagggggatacgatggccaatattatggatatctttggagtgaagtattttccatggatatgttttacagctgttttaaaaaagaagggataatgaatccagaggttggaatgaaatacagaaacctaatcctgaaacctgggggatctctggacggcatggacatgctccacaatttcttgaaacgtgagccaaaccaaaaagcgttcctaatgagtagaggcctgcatgctccgtgaactggggatctttggtagccgtccatgtctggaggacaagtcgacatcaccatgtgttactggcctggaaactgaagggagttttgcaagtgaaaatttagatttctattgacatccttttgttttctaattttaaaaattataaagatgtaaatggaattataaatactgtgacctaagaaaagacccactagaaagtaattgtactataaaatttcataaaactggatttgatttctttttatgaaagtttcatatgaatgtaacttgattttttactattataatctagataatatgatataagagggctaagaatttttaaattgaatcatatatatgatataatttgatccttcttgtatcttgaagttttgtacttgggatttctggactgataaatgaatcatcacattcttctggtaaatattttcttggagctctgtgtcaactttgatcctttgtctcccaggaaggtgtgacctctcctttgcctgcatacctcaaggccaggggaatatgcctcagtgatgcatttatctttgtatatcaggccgcatgattcccaactttctgccacacttaaattacgttcctccatttcagttttgtcttttctgtctaaagttcagtcaaagagtatcaaaaaa

SEQ ID NO: 70 - DNA, 3084 bp, Homo sapiens
tagccgtcgcggcgcgcggtgcggcctgggagagtcggaagcgcggcggccgcggagccctgcgagtaggcagcgttgggcccatgcaggacgcggagaacgtggcggtgcccgaggcggccgaggagcgcgccgagcccggccagcagcagccggccgccgagccgccgccagccgaggggctgctgcggcccgcggggcccggcgctccggaggccgcggggaccgaggcctccagtgaggaggtggggatcgcggaggccgggccggagtccgaggtgaggaccgagccggcggccgaggcagaggcggcctccggcccgtccgagtcgccctcgccgccggccgccgaggagctgcccgggtcgcatgctgagccccctgtcccggcacagggcgaggccccaggagagcaggctcgggacgagcgctccgacagccgggcccaggcggtgtccgaggacgcgggaggaaacgagggcagagcggccgaggccgaaccccgggcgctggagaacggcgacgcggacgagccctccttcagcgaccccgaggacttcgtggacgacgtgagcgaggaagaattactgggagatgtactcaaagatcggccccaggaagcagatggaatcgattcggtgattgtagtggacaatgtccctcaggtgggacccgaccgacttgagaaactcaaaaatgtcatccacaagatcttttccaagtttgggaaaatcacaaatgatttttatcctgaagaggatgggaagacaaaagggtatattttcctggagtacgcgtcccctgcccacgctgtggatgctgtgaagaacgccgacggctacaagcttgacaagcagcacacattccgggtcaacctctttacggattttgacaagtatatgacgatcagtgacgagtgggatattccagagaaacagcctttcaaagacctggggaacttacgttactggcttgaagaggcagaatgcagagatcagtacagtgtgatttttgagagtggagaccgcacttccatattctggaatgacgtaaaagaccctgtctcaattgaagaaagagcgagatggacagagacgtatgtgcgttggtctcctaagggcacctacctggctacctttcatcaaagaggcattgctctatgggggggagagaaattcaagcaaattcagagattcagccaccaaggggttcagcttattgacttctcaccttgtgaaaggtacctggtgacctttagccccctgatggacacgcaggatgaccctcaggccataatcatctgggacatccttacggggcacaagaagaggggttttcactgtgagagctcagcccattggcctatttttaagtggagccatgatggcaaattctttgccagaatgaccctggatacgcttagcatctatgaaactccttctatgggtcttttggacaagaagagtttgaagatctctgggataaaagacttttcttggtctcctggtggtaacataatcgccttctgggtgcctgaagacaaagatattccagccagggtaaccctgatgcagctccctaccaggcaagagatccgagtgaggaacctgttcaatgtggtggactgcaagctccattggcagaagaacggagactacttgtgtgtgaaagtagataggactccgaaaggcacccagggtgttgtcacaaattttgaaattttccgaatgagggagaaacaggtacctgtggatgtggtcgagatgaaagaaaccatcatagcctttgcctgggaaccaaatggaagtaagtttgctgtgctgcacggagaggctccgcggatatctgtgtctttctaccacgtcaaaaacaacgggaagattgaactcatcaagatgttcgacaagcagcaggcgaacaccatcttctggagcccccaaggacagttcgtggtgttggcgggcctgaggagtatgaacggtgccttagcgtttgtggacacttcggactgcacggtcatgaacatcgcagagcactacatggcttccgacgtcgaatgggatcctactgggcgctacgtcgtcacctctgtgtcctggtggagccataaggtggacaacgcgtactggctgtggactttccagggacgcctcctgcagaagaacaacaaggaccgcttctgccagctgctgtggcggccccggcctcccacactcctgagccaggaacagatcaagcaaattaaaaaggatctgaagaaatactctaagatctttgaacagaaggatcgtttgagtcagtccaaagcctcaaaggaattggtggagagaaggcgcaccatgatggaagatttccggaagtaccggaaaatggcccaggagctctatatggagcagaaaaacgagcgcctggagttgcgaggaggggtggacactgacgagctggacagcaacgtggacgactgggaagaggagaccattgagttcttcgtcactgaagaaatcattcccctcgggaatcaggagtgacctggagcactgtggggacggactccgcctgctgttcccgcgctgagctacaggactcccgagtgtgagccgcggttcctctgttgcagcgcagccgtgtgtgctgtggagccgaggccgtcctgcaggaagccgcgtgactcccgcctcctccctgtgctctctggctctggactgtgactgcgcctggattctgccattgcgacacatttttgtgcctttcagcccctggtgtctgcagtgggggatttaaggcacccgcttccacttctttcttgtttggagttttctgttggaaccgccggcgttggctccgaagacttagcgacgccactggcggcaccttctcctgcgcccagtgatgtttccacggtgcctgtacacagccgagcagcatttccgttgaaggacttgcatccccattgcgggcagtgctggacgtgtcccggagacccaccgggagggcgccgccatgccttgtacccccaccgtgcaggttgtggccggttttctccgcaggttgaacatggaaataaaagcaaacttgtatgaaaaa

SEQ ID NO: 71 - DNA, 5147 bp, Homo sapiens
aggcagcagcagagggagagctcggggcttggaggggaaacagcggaagacctaagattatcgggagggcagcagaggcagagaacgaggacaggacccttggccgtcttcttccagggaacgagaggtcacagcctcgctctccgcttatgcttctggcgccccagcttaaagccgaggctgcggctgacaaagggctcgcgccggtgccgccgcccttctcatccgggcattcgggtccctgcgagaaggagggggaaggacagagggggaggggaaggagccggaggggcgcacacttggagctgaagccctctccagggctccgggccggtgccccaacggacagaggtcgaggaggacccgcagaggtggcagcggccgggggcaggaggatggtgcagaaggagagtcaagcgacgttggaggagcgggagagcgagctcagctccaaccctgccgcctctgcgggggcatcgctggagccgccggcagctccggcacccggagaagacaaccccgccggggctgggggagcggcggtggccggggctgcaggaggggctcggcggttcctctgcggtgtggtggaaggattttatggaagaccttgggttatggaacagagaaaagaactctttagaaggctccagaaatgggaattaaatacatacttgtatgccccaaaagatgactacaaacataggatgttttggcgagagatgtattcagtggaggaagctgagcaacttatgactctcatctctgctgcacgagaatatgagatagagttcatctatgcgatctcacctggattggatatcactttttctaaccccaaggaagtatccacattgaaacgtaaattggaccaggtttctcagtttgggtgcagatcatttgctttgctttttgatgatatagaccataatatgtgtgcagcagacaaagaggtattcagttcttttgctcatgcccaagtctccatcacaaatgaaatctatcagtacctaggagagccagaaactttcctcttctgtcccacagaatactgtggcactttctgttatccaaatgtgtctcagtctccatatttaaggactgtgggtgaaaagcttctacctggaattgaagtgctttggacaggtcccaaagttgtttctaaagaaattccagtagagtccatcgaagaggtttctaagattattaagagagctccagtaatctgggataacattcatgctaatgattatgatcagaagagactgtttctgggcccgtacaaaggaagatccacagaactcatcccacggttaaaaggagtcctcactaatccaaattgtgaatttgaagccaactacgttgctatccacacccttgccacctggtacaaatcaaacatgaatggagtgagaaaagatgtagtgatgactgacagtgaagatagtactgtgtccatccagataaaattagaaaatgaaggcagtgatgaagatattgaaactgatgtactctatagtccacagatggctctaaagctagcattaacagaatggttgcaagagtttggtgtgcctcatcaatacagcagtaggcaagttgcacacagtggagctaaagcaagtgtagttgatgggactcctttagttgcagcaccctctttaaatgccacaaccgtagtaacaacagtttatcaggagcccattatgagccagggagcagccttgagtggtgagcctactactctgaccaaggaagaagaaaagaaacagcctgatgaagaacccatggacatggtggtggaaaaacaagaagaaacggaccacaagaatgacaatcaaatactgagtgaaattgttgaagcgaaaatggcagaggaattgaaaccaatggacactgataaagagagcatagctgaatcaaaatccccagagatgtccatgcaagaagattgtattagtgacattgcccccatgcaaactgatgaacagacaaacaaggagcagtttgtgccaggtccaaatgaaaagcctttgtacactgcggaaccagtgaccctggaggatttgcagttacttgctgatctattctaccttccttacgagcatggacccaaaggagcacagatgttacgggaatttcaatggcttcgagcaaatagtagtgttgtcagtgtcaattgcaaaggaaaagactctgaaaaaattgaagaatggcggtcacgagcagccaagtttgaagagatgtgtggactagtgatgggaatgttcactcggctctccaattgtgccaacaggacaattctttatgacatgtactcctatgtttgggatatcaagagtataatgtctatggtgaagtcttttgtacagtggttagggtgtcgtagtcattcttcagcacaattcttaattggagaccaagaaccctgggcctttagaggtggtctagcaggagagttccagcgtttgctgccaattgatggggcaaatgatctcttttttcagccacctccactgactcctacctccaaagtttatactatcagaccttattttcctaaggatgaggcatccgtgtacaagatttgcagagaaatgtatgacgatggagtgggtttaccctttcaaagtcagcctgatcttattggagacaagttagtaggagggctgctttccctcagcctggattactgctttgtcctagaagatgaagatggcatatgtggttatgccttgggcactgtagatgtgaccccctttattaaaaaatgtaaaatttcctggatccccttcatgcaggagaagtataccaagccaaatggtgacaaggaactctctgaggctgagaaaataatgttgagtttccatgaagaacaggaagtactgccagaaactttccttgctaatttcccttctctgataaagatggacattcacaaaaaagtaactgacccaagtgtggccaaaagcatgatggcttgcctcctgtcttcactgaaggctaatggctcccggggagctttctgtgaagtgagaccagatgataaaagaattctggaattttacagcaagttaggatgttttgaaattgcaaaaatggaaggatttccaaaggatgtggttatacttggtcggagcctgtgacatttgttgacactgtgaactgtccaaaagtctcttaactgcaccttgtgaatggtagttgaggtcttcatacagttcagcctctagaatggtaacaaatcagccaattggattcgaaacaaagaagactatgtaaaactcacccatcacactttgagactactcactggttggaagaatatagtattgcagcaaatcctgtatgaaagagagatgtgggcttcctttttgagtcttgtgttaggtgctgagaccttttacatgggcttatacagggagagagtcttcaataaatgtagtcagcactattttctgcatccagtgtggttgcgtttctcacctgagagtaatcaagataacatctgtcatcttccttggtttattgagtgaaatgcctctcagtcttaggggacatggcagagatgaaagaaagaaagagtgggtttcagaagtgtcagggtggagtgattccaagtgggatggttgtggcattagtttaagctgaataaataatttcaatttggggcagttattctgctttttgtaaagccgtggccaattgtctcctgtaatgactgttggttcaggcatgttgtactttgtagggacaaatgtgcatttgtttgtggcaaaagcctacaattgacaaacttgtaaatttctttgtatataaactagctgtaacctgactatcctttgtgtttactgtttttgtaaatttttttcctctataaatgaaagggtgttggttcagaatggcactttgaataatgtaaaccagtgaaaagtggattttctttacttttgtctttgggtttggggttgtttttgttctttttgaagttttattatttttaaagtgcctcccacctaggcgtaggccatgaccatttggggtacgagagcctaattttgtaggacttaatctgttgaaaagtgcagttacttctggaaattaacctcaatattaggtcagcatgtgaaatgttggatttgacatgtcaggtagggttcagggactgattggtcccatttgccctcaggtcagttgtttaatctcaagacctgttactactgattttattaaatcagagtctttaattcttgcatgtttgtatctaatttctgaacgaatgagcacactttaaccagttatttacagttacctttttcctttaaccggattgtgaaagcttcatgtattttaatttagattctgtgtttttaagggttctgagcatgaagctggcagatagtcggcaggactcattttttcatcatggctggctgatttctccatagattgataacagtattttgttatcttgcttctctgtagttttgcatcagctgtttaactttgagctgagtgaggggagaggggtaaagagaaagaaacttaagttttctttcacagaactccaccattgtgggctttgagagagccctaaagcattgtacctagtggtacctagtgacttccaaccaaagcctttgagtatgcactaaataggtgagaagaaaggagagaaggtttttaggttagaaacctttaaccgatagaaggatatggtatgttgtaaagctggaaccaagtttgcatttttgagggcttgagatgaagggaagactcttaccagatagtaagacagctgagttttcctcagttttctcgtcttaacactagtggacaattctagcattttgtttggaggatttcagagttaacctcatggaattcaggattttttagcaagtttgcttttggttttatcttggcttttagtaatcatgttggctggtctggtcacaggtgactgtgaaacagatgcccctggtcttgctttcatcactctaggatcatgaagtgctatgctatttcctggttatgaatattaaggttggaattacatttttattgattgtttggatcagagctcagttcctgtagaaaacgaactgtaaaagaccatgcaagaggcaaaataaaacttgaagtgg

SEQ ID NO: 72 - DNA, 4236 bp, Homo sapiens
ggtgggcggggggaggaggcggccctagcgccattttgtgggagcgaagcggtggctgggctgcgcttgggtccgtcgctgcttcggtgtccctgtcgggcttcccagcagcggcctagcgggaaaagtaaaagatgtctgaatatattcgggtaaccgaagatgagaacgatgagcccattgaaataccatcggaagacgatgggacggtgctgctctccacggttacagcccagtttccaggggcgtgtgggcttcgctacaggaatccagtgtctcagtgtatgagaggtgtccggctggtagaaggaattctgcatgccccagatgctggctggggaaatctggtgtatgttgtcaactatccaaaagataacaaaagaaaaatggatgagacagatgcttcatcagcagtgaaagtgaaaagagcagtccagaaaacatccgatttaatagtgttgggtctcccatggaaaacaaccgaacaggacctgaaagagtattttagtacctttggagaagttcttatggtgcaggtcaagaaagatcttaagactggtcattcaaaggggtttggctttgttcgttttacggaatatgaaacacaagtgaaagtaatgtcacagcgacatatgatagatggacgatggtgtgactgcaaacttcctaattctaagcaaagccaagatgagcctttgagaagcagaaaagtgtttgtggggcgctgtacagaggacatgactgaggatgagctgcgggagttcttctctcagtacggggatgtgatggatgtcttcatccccaagccattcagggcctttgcctttgttacatttgcagatgatcagattgcgcagtctctttgtggagaggacttgatcattaaaggaatcagcgttcatatatccaatgccgaacctaagcacaatagcaatagacagttagaaagaagtggaagatttggtggtaatccaggtggctttgggaatcagggtggatttggtaatagcagagggggtggagctggtttgggaaacaatcaaggtagtaatatgggtggtgggatgaactttggtgcgttcagcattaatccagccatgatggctgccgcccaggcagcactacagagcagttggggtatgatgggcatgttagccagccagcagaaccagtcaggcccatcgggtaataaccaaaaccaaggcaacatgcagagggagccaaaccaggccttcggttctggaaataactcttatagtggctctaattctggtgcagcaattggttggggatcagcatccaatgcagggtcgggcagtggttttaatggaggctttggctcaagcatggattctaagtcttctggctggggaatgtagacagtggggttgtggttggttggtatagaatggtgggaattcaaatttttctaaactcatggtaagtatattgtaaaatacatatgtactaagaattttcaaaattggtttgttcagtgtggagtatattcagcagtatttttgacatttttctttagaaaaaggaagagctaaaggaattttataagttttgttacatgaaaggttgaaatattgagtggttgaaagtgaactgctgtttgcctgattggtaaaccaacacactacaattgatatcaaaaggtttctcctgtaatattttatccctggacttgtcaagtgaattctttgcatgttcaaaacggaaaccattgattagaactacattctttaccccttgttttaatttgaaccccaccatatggatttttttccttaagaaaatctccttttaggagatcatggtgtcacagtgtttggttcttttgttttgttttttaacacttgtctcccctcatacacaaaagtacaatatgaagccttcatttaatctctgcagttcatctcatttcaaatgtttatggaagaagcacttcattgaaagtagtgctgtaaatattctgccataggaatactgtctacatgctttctcattcaagaattcgtcatcacgcatcacaggccgcgtctttgacggtgggtgtcccatttttatccgctactctttatttcatggagtcgtatcaacgctatgaacgcaaggctgtgatatggaaccagaaggctgtctgaacttttgaaaccttgtgtgggattgatggtggtgccgaggcatgaaaggctagtatgagcgagaaaaggagagagcgcgtgcagagacttggtggtgcataatggatattttttaacttggcgagatgtgtctctcaatcctgtggctttggtgagagagtgtgcagagagcaatgatagcaaataatgtacgaatgttttttgcattcaaaggacatccacatctgttggaagacttttaagtgagtttttgttcttagataacccacattagatgaatgtgttaagtgaaatgatacttgtactccccctacccctttgtcaactgctgtgaatgctgtatggtgtgtgttctcttctgttactgatatgtaagtgtggcaatgtgaactgaagctgatgggctgagaacatggactgagcttgtggtgtgctttgcaggaggacttgaagcagagttcaccagtgagctcaggtgtctcaaagaagggtggaagttctaatgtctgttagctacccataagaatgctgtttgctgcagttctgtgtcctgtgcttggatgctttttataagagttgtcattgttggaaattcttaaataaaactgatttaaataatatgtgtctttgttttgcagccctgaatgcaaagaattcatagcagttaattccccttttttgacccttttgagatggaactttcataaagtttcttggcagtagtttattttgcttcaaataaacttatttgaaaagttgtctcaagtcaaatggattcatcacctgtcatgcattgacacctgatacccagacttaattggtatttgttcttgcattggccaaagtgaaaatttttttttttcttttgaaatctagttttgaataagtctgggtgaccgcacctaaaatggtaagcagtaccctccggctttttcttagtgcctctgtgcatttgggtgatgttctatttacatggcctgtgtaaatctccattgggaagtcatgccttctaaaaagattcttatttgggggagtgggcaaaatgttgattattttctaatgctttgtagcaaagcatatcaattgaaaagggaatatcagcaccttcctagtttgggatttgaaaagtggaattaattgcagtagggataaagtagaagaaaccacaaattatcttgtgcctgaaatccattaagaggcctgatagctttaagaattagggtgggttgtctgtctggaagtgttaagtggaatgggctttgtcctccaggaggtgggggaatgtggtaacattgaatacagttgaataaaatcgcttacaaaactcacactctcacaatgcattgttaagtatgtaaaagcaataacattgattctctgttgtacttttttgtaactaattctgtgagagttgagctcattttctagttggaagaatgtgatatttgttgtgttggtagtttacctaatgcccttacctaattagattatgataaataggtttgtcattttgcaagttacataaacatttatcaatgaagtcatcctttagacttgtaatcgccacattgtttcattattcagtttcctctgtaaagggatcttgagttgttttaattttttttttctgcatctgaatctgcatgatttccaaaccctgtaccatctgaattttgcattttagcacttgcactattactcagcagcagtaacatggtaacacttaaaatggtactcggggacctccaaagactaaactgacaagccttcaaggagcccaggggtaagttaacttgtcaacggcatggtttaatcccttctttacacttgtgtaaatttcagttactggtcatagaaggctttcaatgttgagtggccttttattaacatgtttatggtactgcatagatacgggtatttattttaccctaagaagattttgaagtttaaaagtacttaaactatttggcaaagatttgtttttaaaaatctatttggtcaatctaaatgcattcattctaaaaaattttttgaaccagataaataaaatttttttttgacaccacaaaaaaaaaaaaaaaaaaaa

SEQ ID NO: 73 - DNA, 4761 bp, Homo sapiens
gccattttgtgcagtcgctgggaaggaaggagacgcctaaaccgcggcactgcccggtttgagcgtagccaaacctgcccaccggctttgtagccccgattctctgtgttttgctcccgtctccgacgagagaggcggcgacggtggcgtctgcgacgggagacagcgcgtcggagcgagagagcgctgcgcctgccgccgccccaacagcggaggcgccgccgccatcggtcgtcaccagaccggagccgcaggccctcccgagcccggccatccgtgccccgctcccagatctctatccttttgggaccatgcgcggaggaggctttggggaccgggaccgggatcgtgaccgtggaggatttggagcaagaggtggtggtggccttcccccgaagaaatttggtaatcctggggagcgtttgcgtaaaaaaaagtgggatttgagtgagctccccaagtttgagaaaaatttttatgtggaacatccggaagtagcaaggctgacaccatatgaggttgatgagctacgccgaaagaaggagattacagtgagggggggagatgtttgtcctaaacccgtgtttgccttccatcatgctaacttcccacaatatgtaatggatgtgttgatggatcagcactttacagaaccaactccaattcagtgccagggatttccgttggctcttagtggccgggatatggtgggcattgctcagactggctctgggaagacgttggcgtatctcctgcctgcaattgttcatattaaccaccagccatacttggaaaggggagatggcccaatctgtctagttctggctcctaccagagagcttgcccagcaagtacagcaggtggccgatgactatggcaaatgttctagattgaagagtacttgtatttatggaggtgctcctaaaggtccccagattcgagacttggaaagaggtgttgagatctgcatagccactcctggacgtctgatagatttcctggagtcaggaaagacaaatcttcgccgatgtacttaccttgtattggacgaagctgacagaatgcttgatatggggtttgaaccccagatccgtaaaattgttgaccaaatcaggcctgataggcagacactgatgtggagtgcaacctggccaaaagaagtaagacagcttgcagaggatttccttcgtgattacacccagatcaacgtaggcaatctggagttgagtgccaaccacaacatcctccagatagtggatgtctgcatggaaagtgaaaaagaccacaagttgatccaactaatggaagaaataatggctgaaaaggaaaacaaaacaataatatttgtggagacaaagagacgctgtgatgatctgactcgaaggatgcgcagagatggttggccagctatgtgtatccatggagacaagagtcaaccagaaagagattgggtacttaatgagttccgttctggaaaggcacccatccttattgctacagatgtagcctcccgtgggctagatgtggaagatgtcaagtttgtgatcaactatgactatccaaacagctcagaggattatgtgcaccgtattggccgaacagcccgtagcaccaacaagggtaccgcctataccttcttcaccccagggaacctaaaacaggccagagagcttatcaaagtgctggaagaggccaatcaggctatcaatccaaaactgatgcagcttgtggaccacagaggaggcggcggaggcgggggtggtcgttctcgttaccggaccacttcttcagccaacaatcccaatctgatgtatcaggatgagtgtgaccgaaggcttcgaggagtcaaggatggtggccggagagactctgcaagctatcgggatcgtagtgaaaccgatagagctggttatgctaatggcagtggctatggaagtccaaattctgcctttggagcacaagcaggccaatacacctatggtcaaggcacctatggggcagctgcttatggcaccagtagctatacagctcaagaatatggtgctggcacttatggagctagtagcaccacctcaactgggagaagttcacagagctctagccagcagtttagtgggataggccggtctgggcagcagccacagccactgatgtcacaacagtttgcacagcctccgggagctaccaatatgataggttacatggggcagactgcctaccaataccctcctcctcctccccctcctcctccttcacgtaaatgaaaccactcaagtggtagtgactccagcagacttaattacattttaaggaacactgtctttcctttttttttcctcttcgccttttctttttttttccttttttctttttttttttttaatttttccccccaaccatcgtgatttgtcttttcatgcagattagttagaattcactgccaggtttcttctgcccaccaaaatgatccagtctggaataacattttgtaaaaaaaaaaaaaatatatatatatatatatagctgactggaagagattaatttcttcccccaacttcttgcatgttgaagatatttgagctatttttcatctaaaagagtaaggtattaggcccttttgtgggagccccatgttttgtttttctgagttggtggggagggagggagggggagggctgaattgttttgcagaggaagatggcatctgtgctttaaatttctcattactgggttagaaaacaaagagggagtgccctgcacattttcttttgtgcttttaaatgtttcttaagttggaacaggtttcctcgggcctgttttgactgattgctggagtgcatttgatagttaaaaattactaattggttttatttcccttcacactctgcctccccacttctccccccgttactgaaaaataaccattttagtgtcaggctagaaattgaattgctgagttttgtgtatcctttaaattaaaaaccacaagtgtttattgtagtggttaaactgtagcatctcagcatctgggtggaagctgcctatatttcttcccagtttaactggggaccatctgtgaaattaattttccatccagacagctgctgtgagcaaatgaacataaatgctcgctggaaatttactaaccagtttttatattgacctgcagtgtaaaaagcacatttaattataaacaatatattcaaaatgggcaaattttattttcaaatgcagtgtagagctagattaaaagcaactctttgccacctactctgcccttttggcaaagttaccttgaacaaagaatcttaagggtttattaagaactctttattttcttcataccctgttctctgcagtgctttctaacagcttctgggtgcagattttcttcggcatccttttgcactcagcttattacaggtaggtagtgcttaagaaaagtcatggaggactaaagcctaagtccttttcacttttcctccatctgaaggtaggtgagttcatcctcttcatagtaatgctgttttaccaagactttatagcagatggacccagaaagaattttctgctattgtgttcactacaacaggatagggacatcagacagccccagaaaccccttccagatctgatatgggactattaatttttatgctgttaattggtattcattcacaatgcagttgaagggggaaggctccactgcattctttggctaaggcctgaatgcttgctcatctgtaagatctatactcgaggttttgttttccttttaaaattctttagggagagagggatggtttctgaggggttctgaaagtatgattcaatgtgcaacatacaggtaggtcttcagcataagctgaaatatatgcatgtaaaaactttgacatctttttttttaattttccactttcttcttaactttacttctctttttgtcccccccccatcttacagaagttgaggccaagggagaatggtaggcacagaagaaacatggcaaactgctctgtgctttcaaaccaaagtgttccccccaaccccaaatttgtctaagcactggccagtctgttgtgggcattgttttctacaaccaaattctgggtttttttcttctttctttaaacatagaggtaccaccacaagggatgccctactctctcgcagctcttgaaagcatctgtttgagggaaaggtctctgggcaagcaagtggttatttggattgcttgcttccctttttccacctgggacattgtaatcataaaataacagtaaattccaaacctcaaaaactattatggcctgagcacagctgaaatctagcagagtttaactcttctgcctccatgtctgtcacttataattcaggttctgctgttggcttcagaacatgagcagaagaatcgttttatgctagttattgcattcatggttgaaactcaacttagggaaagggttccaatgtattaagcaatgggctgcttctccccaatcctccctaacaattcgttgtgtggacttctcatctaaaaggttagtggcttttgcttgggatcagtgctctctattgatgttcttgctggtctccagacacattcctgttgcattaagacttgaaagacttgtagatgtgtgatgttcaggcacaggatgctgaaagctatgttactattcttagtttgtaaattgtccttttgataccatcatcttgttttctttttgtaggtataaataaaaacactgttgacaataa

SEQ ID NO: 74 - DNA, 12684 bp, Homo sapiens
gcgggcgggcgggaggactcgactcggtgggagccgctagagccgggcgcccggggacgtagcctgtagggccaccgggtccccgtcagaggcggcggcgggagcagcggggactgcaggccggggtgcagcgaacgcgaccccgcgggctgcggcccggtgtgtgcggagcgtggcgggcgcagcttaccgggcggaggtgagcgcggcgccggctcctcctgcggcggactttgggtgcgacttgacgagcggtggttcgacaagtggccttgcgggccggatcgtcccagtggaagagttgtaaatttgcttctggccttcccctacggattatacctggccttcccctacggattatactcaacttactgtttagaaaatgtggcccacgagacgcctggttactatcaaaaggagcggggtcgacggtccccactttcccctgagcctcagcacctgcttgtttggaaggggtattgaatgtgacatccgtatccagcttcctgttgtgtcaaaacaacattgcaaaattgaaatccatgagcaggaggcaatattacataatttcagttccacaaatccaacacaagtaaatgggtctgttattgatgagcctgtacggctaaaacatggagatgtaataactattattgatcgttccttcaggtatgaaaatgaaagtcttcagaatggaaggaagtcaactgaatttccaagaaaaatacgtgaacaggagccagcacgtcgtgtctcaagatctagcttctcttctgaccctgatgagaaagctcaagattccaaggcctattcaaaaatcactgaaggaaaagtttcaggaaatcctcaggtacatatcaagaatgtcaaagaagacagtaccgcagatgactcaaaagacagtgttgctcagggaacaactaatgttcattcctcagaacatgctggacgtaatggcagaaatgcagctgatcccatttctggggattttaaagaaatttccagcgttaaattagtgagccgttatggagaattgaagtctgttcccactacacaatgtcttgacaatagcaaaaaaaatgaatctcccttttggaagctttatgagtcagtgaagaaagagttggatgtaaaatcacaaaaagaaaatgtcctacagtattgtagaaaatctggattacaaactgattacgcaacagagaaagaaagtgctgatggtttacagggggagacccaactgttggtctcgcgtaagtcaagaccaaaatctggtgggagcggccacgctgtggcagagcctgcttcacctgaacaagagcttgaccagaacaaggggaagggaagagacgtggagtctgttcagactcccagcaaggctgtgggcgccagctttcctctctatgagccggctaaaatgaagacccctgtacaatattcacagcaacaaaattctccacaaaaacataagaacaaagacctgtatactactggtagaagagaatctgtgaatctgggtaaaagtgaaggcttcaaggctggtgataaaactcttactcccaggaagctttcaactagaaatcgaacaccagctaaagttgaagatgcagctgactctgccactaagccagaaaatctctcttccaaaaccagaggaagtattcctacagatgtggaagttctgcctacggaaactgaaattcacaatgagccatttttaactctgtggctcactcaagttgagaggaagatccaaaaggattccctcagcaagcctgagaaattgggcactacagctggacagatgtgctctgggttacctggtcttagttcagttgatatcaacaactttggtgattccattaatgagagtgagggaatacctttgaaaagaaggcgtgtgtcctttggtgggcacctaagacctgaactatttgatgaaaacttgcctcctaatacgcctctcaaaaggggagaagccccaaccaaaagaaagtctctggtaatgcacactccacctgtcctgaagaaaatcatcaaggaacagcctcaaccatcaggaaaacaagagtcaggttcagaaatccatgtggaagtgaaggcacaaagcttggttataagccctccagctcctagtcctaggaaaactccagttgccagtgatcaacgccgtaggtcctgcaaaacagcccctgcttccagcagcaaatctcagacagaggttcctaagagaggagggagaaagagtggcaacctgccttcaaagagagtgtctatcagccgaagtcaacatgatattttacagatgatatgttccaaaagaagaagtggtgcttcggaagcaaatctgattgttgcaaaatcatgggcagatgtagtaaaacttggtgcaaaacaaacacaaactaaagtcataaaacatggtcctcaaaggtcaatgaacaaaaggcaaagaagacctgctactccaaagaagcctgtgggcgaagttcacagtcaatttagtacaggccacgcaaactctccttgtaccataataatagggaaagctcatactgaaaaagtacatgtgcctgctcgaccctacagagtgctcaacaacttcatttccaaccaaaaaatggactttaaggaagatctttcaggaatagctgaaatgttcaagaccccagtgaaggagcaaccgcagttgacaagcacatgtcacatcgctatttcaaattcagagaatttgcttggaaaacagtttcaaggaactgattcaggagaagaacctctgctccccacctcagagagttttggaggaaatgtgttcttcagtgcacagaatgcagcaaaacagccatctgataaatgctctgcaagccctcccttaagacggcagtgtattagagaaaatggaaacgtagcaaaaacgcccaggaacacctacaaaatgacttctctggagacaaaaacttcagatactgagacagagccttcaaaaacagtatccactgcaaacaggtcaggaaggtctacagagttcaggaatatacagaagctacctgtggaaagtaagagtgaagaaacaaatacagaaattgttgagtgcatcctaaaaagaggtcagaaggcaacactactacaacaaaggagagaaggagagatgaaggaaatagaaagaccttttgagacatataaggaaaatattgaattaaaagaaaacgatgaaaagatgaaagcaatgaagagatcaagaacttgggggcagaaatgtgcaccaatgtctgacctgacagacctcaagagcttgcctgatacagaactcatgaaagacacggcacgtggccagaatctcctccaaacccaagatcatgccaaggcaccaaagagtgagaaaggcaaaatcactaaaatgccctgccagtcattacaaccagaaccaataaacaccccaacacacacaaaacaacagttgaaggcatccctggggaaagtaggtgtgaaagaagagctcctagcagtcggcaagttcacacggacgtcaggggagaccacgcacacgcacagagagccagcaggagatggcaagagcatcagaacgtttaaggagtctccaaagcagatcctggacccagcagcccgtgtaactggaatgaagaagtggccaagaacgcctaaggaagaggcccagtcactagaagacctggctggcttcaaagagctcttccagacaccaggtccctctgaggaatcaatgactgatgagaaaactaccaaaatagcctgcaaatctccaccaccagaatcagtggacactccaacaagcacaaagcaatggcctaagagaagtctcaggaaagcagatgtagaggaagaattcttagcactcaggaaactaacaccatcagcagggaaagccatgcttacgcccaaaccagcaggaggtgatgagaaagacattaaagcatttatgggaactccagtgcagaaactggacctggcaggaactttacctggcagcaaaagacagctacagactcctaaggaaaaggcccaggctctagaagacctggctggctttaaagagctcttccagactcctggtcacaccgaggaattagtggctgctggtaaaaccactaaaataccctgcgactctccacagtcagacccagtggacaccccaacaagcacaaagcaacgacccaagagaagtatcaggaaagcagatgtagagggagaactcttagcgtgcaggaatctaatgccatcagcaggcaaagccatgcacacgcctaaaccatcagtaggtgaagagaaagacatcatcatatttgtgggaactccagtgcagaaactggacctgacagagaacttaaccggcagcaagagacggccacaaactcctaaggaagaggcccaggctctggaagacctgactggctttaaagagctcttccagacccctggtcatactgaagaagcagtggctgctggcaaaactactaaaatgccctgcgaatcttctccaccagaatcagcagacaccccaacaagcacaagaaggcagcccaagacacctttggagaaaagggacgtacagaaggagctctcagccctgaagaagctcacacagacatcaggggaaaccacacacacagataaagtaccaggaggtgaggataaaagcatcaacgcgtttagggaaactgcaaaacagaaactggacccagcagcaagtgtaactggtagcaagaggcacccaaaaactaaggaaaaggcccaacccctagaagacctggctggcttgaaagagctcttccagacaccagtatgcactgacaagcccacgactcacgagaaaactaccaaaatagcctgcagatcacaaccagacccagtggacacaccaacaagctccaagccacagtccaagagaagtctcaggaaagtggacgtagaagaagaattcttcgcactcaggaaacgaacaccatcagcaggcaaagccatgcacacacccaaaccagcagtaagtggtgagaaaaacatctacgcatttatgggaactccagtgcagaaactggacctgacagagaacttaactggcagcaagagacggctacaaactcctaaggaaaaggcccaggctctagaagacctggctggctttaaagagctcttccagacacgaggtcacactgaggaatcaatgactaacgataaaactgccaaagtagcctgcaaatcttcacaaccagacccagacaaaaacccagcaagctccaagcgacggctcaagacatccctggggaaagtgggcgtgaaagaagagctcctagcagttggcaagctcacacagacatcaggagagactacacacacacacacagagccaacaggagatggtaagagcatgaaagcatttatggagtctccaaagcagatcttagactcagcagcaagtctaactggcagcaagaggcagctgagaactcctaagggaaagtctgaagtccctgaagacctggccggcttcatcgagctcttccagacaccaagtcacactaaggaatcaatgactaacgaaaaaactaccaaagtatcctacagagcttcacagccagacctagtggacaccccaacaagctccaagccacagcccaagagaagtctcaggaaagcagacactgaagaagaatttttagcatttaggaaacaaacgccatcagcaggcaaagccatgcacacacccaaaccagcagtaggtgaagagaaagacatcaacacgtttttgggaactccagtgcagaaactggaccagccaggaaatttacctggcagcaatagacggctacaaactcgtaaggaaaaggcccaggctctagaagaactgactggcttcagagagcttttccagacaccatgcactgataaccccacgactgatgagaaaactaccaaaaaaatactctgcaaatctccgcaatcagacccagcggacaccccaacaaacacaaagcaacggcccaagagaagcctcaagaaagcagacgtagaggaagaatttttagcattcaggaaactaacaccatcagcaggcaaagccatgcacacgcctaaagcagcagtaggtgaagagaaagacatcaacacatttgtggggactccagtggagaaactggacctgctaggaaatttacctggcagcaagagacggccacaaactcctaaagaaaaggccaaggctctagaagatctggctggcttcaaagagctcttccagacaccaggtcacactgaggaatcaatgaccgatgacaaaatcacagaagtatcctgcaaatctccacaaccagacccagtcaaaaccccaacaagctccaagcaacgactcaagatatccttggggaaagtaggtgtgaaagaagaggtcctaccagtcggcaagctcacacagacgtcagggaagaccacacagacacacagagagacagcaggagatggaaagagcatcaaagcgtttaaggaatctgcaaagcagatgctggacccagcaaactatggaactgggatggagaggtggccaagaacacctaaggaagaggcccaatcactagaagacctggccggcttcaaagagctcttccagacaccagaccacactgaggaatcaacaactgatgacaaaactaccaaaatagcctgcaaatctccaccaccagaatcaatggacactccaacaagcacaaggaggcggcccaaaacacctttggggaaaagggatatagtggaagagctctcagccctgaagcagctcacacagaccacacacacagacaaagtaccaggagatgaggataaaggcatcaacgtgttcagggaaactgcaaaacagaaactggacccagcagcaagtgtaactggtagcaagaggcagccaagaactcctaagggaaaagcccaacccctagaagacttggctggcttgaaagagctcttccagacaccaatatgcactgacaagcccacgactcatgagaaaactaccaaaatagcctgcagatctccacaaccagacccagtgggtaccccaacaatcttcaagccacagtccaagagaagtctcaggaaagcagacgtagaggaagaatccttagcactcaggaaacgaacaccatcagtagggaaagctatggacacacccaaaccagcaggaggtgatgagaaagacatgaaagcatttatgggaactccagtgcagaaattggacctgccaggaaatttacctggcagcaaaagatggccacaaactcctaaggaaaaggcccaggctctagaagacctggctggcttcaaagagctcttccagacaccaggcactgacaagcccacgactgatgagaaaactaccaaaatagcctgcaaatctccacaaccagacccagtggacaccccagcaagcacaaagcaacggcccaagagaaacctcaggaaagcagacgtagaggaagaatttttagcactcaggaaacgaacaccatcagcaggcaaagccatggacacaccaaaaccagcagtaagtgatgagaaaaatatcaacacatttgtggaaactccagtgcagaaactggacctgctaggaaatttacctggcagcaagagacagccacagactcctaaggaaaaggctgaggctctagaggacctggttggcttcaaagaactcttccagacaccaggtcacactgaggaatcaatgactgatgacaaaatcacagaagtatcctgtaaatctccacagccagagtcattcaaaacctcaagaagctccaagcaaaggctcaagatacccctggtgaaagtggacatgaaagaagagcccctagcagtcagcaagctcacacggacatcaggggagactacgcaaacacacacagagccaacaggagatagtaagagcatcaaagcgtttaaggagtctccaaagcagatcctggacccagcagcaagtgtaactggtagcaggaggcagctgagaactcgtaaggaaaaggcccgtgctctagaagacctggttgacttcaaagagctcttctcagcaccaggtcacactgaagagtcaatgactattgacaaaaacacaaaaattccctgcaaatctcccccaccagaactaacagacactgccacgagcacaaagagatgccccaagacacgtcccaggaaagaagtaaaagaggagctctcagcagttgagaggctcacgcaaacatcagggcaaagcacacacacacacaaagaaccagcaagcggtgatgagggcatcaaagtattgaagcaacgtgcaaagaagaaaccaaacccagtagaagaggaacccagcaggagaaggccaagagcacctaaggaaaaggcccaacccctggaagacctggccggcttcacagagctctctgaaacatcaggtcacactcaggaatcactgactgctggcaaagccactaaaataccctgcgaatctcccccactagaagtggtagacaccacagcaagcacaaagaggcatctcaggacacgtgtgcagaaggtacaagtaaaagaagagccttcagcagtcaagttcacacaaacatcaggggaaaccacggatgcagacaaagaaccagcaggtgaagataaaggcatcaaagcattgaaggaatctgcaaaacagacaccggctccagcagcaagtgtaactggcagcaggagacggccaagagcacccagggaaagtgcccaagccatagaagacctagctggcttcaaagacccagcagcaggtcacactgaagaatcaatgactgatgacaaaaccactaaaataccctgcaaatcatcaccagaactagaagacaccgcaacaagctcaaagagacggcccaggacacgtgcccagaaagtagaagtgaaggaggagctgttagcagttggcaagctcacacaaacctcaggggagaccacgcacaccgacaaagagccggtaggtgagggcaaaggcacgaaagcatttaagcaacctgcaaagcggaagctggacgcagaagatgtaattggcagcaggagacagccaagagcacctaaggaaaaggcccaacccctggaagatctggccagcttccaagagctctctcaaacaccaggccacactgaggaactggcaaatggtgctgctgatagctttacaagcgctccaaagcaaacacctgacagtggaaaacctctaaaaatatccagaagagttcttcgggcccctaaagtagaacccgtgggagacgtggtaagcaccagagaccctgtaaaatcacaaagcaaaagcaacacttccctgcccccactgcccttcaagaggggaggtggcaaagatggaagcgtcacgggaaccaagaggctgcgctgcatgccagcaccagaggaaattgtggaggagctgccagccagcaagaagcagagggttgctcccagggcaagaggcaaatcatccgaacccgtggtcatcatgaagagaagtttgaggacttctgcaaaaagaattgaacctgcggaagagctgaacagcaacgacatgaaaaccaacaaagaggaacacaaattacaagactcggtccctgaaaataagggaatatccctgcgctccagacgccaaaataagactgaggcagaacagcaaataactgaggtctttgtattagcagaaagaatagaaataaacagaaatgaaaagaagcccatgaagacctccccagagatggacattcagaatccagatgatggagcccggaaacccatacctagagacaaagtcactgagaacaaaaggtgcttgaggtctgctagacagaatgagagctcccagcctaaggtggcagaggagagcggagggcagaagagtgcgaaggttctcatgcagaatcagaaagggaaaggagaagcaggaaattcagactccatgtgcctgagatcaagaaagacaaaaagccagcctgcagcaagcactttggagagcaaatctgtgcagagagtaacgcggagtgtcaagaggtgtgcagaaaatccaaagaaggctgaggacaatgtgtgtgtcaagaaaataagaaccagaagtcatagggacagtgaagatatttgacagaaaaatcgaactgggaaaaatataataaagttagttttgtgataagttctagtgcagtttttgtcataaattacaagtgaattctgtaagtaaggctgtcagtctgcttaagggaagaaaactttggatttgctgggtctgaatcggcttcataaactccactgggagcactgctgggctcctggactgagaatagttgaacaccgggggctttgtgaaggagtctgggccaaggtttgccctcagctttgcagaatgaagccttgaggtctgtcaccacccacagccaccctacagcagccttaactgtgacacttgccacactgtgtcgtcgtttgtttgcctatgtcctccagggcacggtggcaggaacaactatcctcgtctgtcccaacactgagcaggcactcggtaaacacgaatgaatggatgagcgcacggatgaatggagcttacaagatctgtctttccaatggccgggggcatttggtccccaaattaaggctattggacatctgcacaggacagtcctatttttgatgtcctttcctttctgaaaataaagttttgtgctttggagaatgactcgtgagcacatctttagggaccaagagtgactttctgtaaggagtgactcgtggcttgccttggtctcttgggaatacttttctaactagggttgctctcacctgagacattctccacccgcggaatctcagggtcccaggctgtgggccatcacgacctcaaactggctcctaatctccagctttcctgtcattgaaagcttcggaagtttactggctctgctcccgcctgttttctttctgactctatctggcagcccgatgccacccagtacaggaagtgacaccagtactctgtaaagcatcatcatccttggagagactgagcactcagcaccttcagccacgatttcaggatcgcttccttgtgagccgctgcctccgaaatctcctttgaagcccagacatctttctccagcttcagacttgtagatataactcgttcatcttcatttactttccactttgccccctgtcctctctgtgttccccaaatcagagaatagcccgccatcccccaggtcacctgtctggattcctccccattcacccaccttgccaggtgcaggtgaggatggtgcaccagacagggtagctgtcccccaaaatgtgccctgtgcgggcagtgccctgtctccacgtttgtttccccagtgtctggcggggagccaggtgacatcataaatacttgctgaatgaatgcagaaatcagcggtactgacttgtactatattggctgccatgatagggttctcacagcgtcatccatgatcgtaagggagaatgacattctgcttgagggagggaatagaaaggggcagggaggggacatctgagggcttcacagggctgcaaagggtacagggattgcaccagggcagaacaggggagggtgttcaaggaagagtggctcttagcagaggcactttggaaggtgtgaggcataaatgcttccttctacgtaggccaacctcaaaactttcagtaggaatgttgctatgatcaagttgttctaacactttagacttagtagtaattatgaacctcacatagaaaaatttcatccagccatatgcctgtggagtggaatattctgtttagtagaaaaatcctttagagttcagctctaaccagaaatcttgctgaagtatgtcagcaccttttctcaccctggtaagtacagtatttcaagagcacgctaagggtggttttcattttacagggctgttgatgatgggttaaaaatgttcatttaagggctacccccgtgtttaatagatgaacaccacttctacacaaccctccttggtactgggggagggagagatctgacaaatactgcccattcccctaggctgactggatttgagaacaaatacccacccatttccaccatggtatggtaacttctctgagcttcagtttccaagtgaatttccatgtaataggacattcccattaaatacaagctgtttttactttttcgcctcccagggcctgtgggatctggtcccccagcctctcttgggctttcttacactaactctgtacctaccatctcctgcctcccttaggcaggcacctccaaccaccacacactccctgctgttttccctgcctggaactttccctcctgccccaccaagatcatttcatccagtcctgagctcagcttaagggaggcttcttgcctgtgggttccctcacccccatgcctgtcctccaggctggggcaggttcttagtttgcctggaattgttctgtacctctttgtagcacgtagtgttgtggaaactaagccactaattgagtttctggctcccctcctggggttgtaagttttgttcattcatgagggccgactgcatttcctggttactctatcccagtgaccagccacaggagatgtccaataaagtatgtgatgaaatggtcttaaaa

SEQ ID NO: 75 - DNA, 11579 bp, Homo sapiens; identical to SEQ ID NO: 66

SEQ ID NO: 76 - DNA, 2133 bp, Homo sapiens
ctcagctagggcctgccggttcctagtgcgtgcccagcagtcctcaggtcaccttcactaccgggccaaggaccccgtgggaactcgcagccttcgccacactcgttcctcgcgcatccatggaggggtgcctacagagaagacctgcgtggcaaaaacctaaacgaagagatgaggggcatggagaggagtaggataagagaataaagataacagtgggggggagacgttagtttcctttatatcttttgttactggcggtagcagtgaagttagaaacggttttaaaacaaatttcagacaggcattttccaaaggcaagcctggagcgcacggatctgtataaccgcggaaggccctgtttccggtcccttgcgcctgcgctcttgcagccaagaaggcgggaggctggagtagagggaagcctgcaaccggaagtgaaggcagatttccctccttcgtcgctgttgctgccgccatacgcgctctccctgtttagctcttctgttagaaatagtatctttgttttcctttgctgttcctcaatcccctactcttcaccccttgttttcacctattttgcgagaacccatccagatcccccttcccttcttcccctgccggcccagttatggcagagaacgatgtggacaatgagctcttggactatgaagatgatgaggtggagacagcagctgggggagatggggctgaggcccctgccaagaaggatgtcaagggctcctatgtctccatccacagctctggctttcgtgacttcctgctcaagccagagttgctccgggccattgtcgactgtggctttgagcatccgtcagaagtccagcatgagtgcatccctcaggccattctgggaatggatgtcctgtgccaggccaagtcgggcatgggaaagacagcagtgtttgtcttggccacactgcaacagctggagccagttactgggcaggtgtctgtactggtgatgtgtcacactcgggagttggcttttcagatcagcaaggaatatgagcgcttctctaaatacatgcccaatgtcaaggttgctgttttttttggtggtctgtctatcaagaaggatgaagaggtgctgaagaagaactgcccgcatatcgtcgtggggactccaggccgtatcctagccctggctcgaaataagagcctcaacctcaaacacattaaacactttattttggatgaatgtgataagatgcttgaacagctcgacatgcgtcgggatgtccaggaaatttttcgcatgaccccccacgagaagcaggtcatgatgttcagtgctaccttgagcaaagagatccgtccagtctgccgcaagttcatgcaagatccaatggagatcttcgtggatgatgagacgaagttgacgctgcatgggttgcagcagtactacgtgaaactgaaggacaacgagaagaaccggaagctctttgaccttctggatgtccttgagttcaaccaggtggtgatctttgtgaagtctgtgcagcggtgcattgccttggcccagctactagtggagcagaacttcccagccattgccatccaccgtgggatgccccaggaggagaggctttctcggtatcagcagtttaaagattttcaacgacgaattcttgtggctaccaacctatttggccgaggcatggacatcgagcgggtgaacattgcttttaattatgacatgcctgaggattctgacacctacctgcatcgggtggccagagcaggccggtttggcaccaagggcttggctatcacatttgtgtccgatgagaatgatgccaagatcctcaatgatgtgcaggatcgctttgaggtcaatattagtgagctgcctgatgagatagacatctcctcctacattgaacagacacggtagaagactcgcccattttggaatgtgaccgtctgtccttcaggagaggacaccagggtgggggtgaaggagacactactgcccccacccctgacagcccccaccccatggcttccatcttttgcatcaccaccactcctgaacccccatttctgatttgtcagaatttttttttaacaaaactaaaaatgaaacacatgtgtctgtggtatctataa

SEQ ID NO: 77 - DNA, 2313 bp, Homo sapiens; identical to SEQ ID NO: 26

SEQ ID NO: 78 - DNA, 8568 bp, Homo sapiens
cctcgctccctctccggtaatgagggggctgagctgtccctccgaggagggggcctggtgtggataaaagagacgaaaaagccgggggaggtttccaaaaataaaaccgtccgggtccccttcagacggctgcaggcacagggaggaggcgcgaaggtgcagcagccgtgcgagcccagctggagtaggagcgcggactcgaggctcggggcgcgcagccctcgttccgccgagagccgggcccccagtcggccgcttcagggccccctagactcagagaagctggccgccgggcggggccgggagaacagcccgcgggcgtccagcgtgccgaccacaaagctcttcgcggtgcccgcgcgcaccactctccagccgccccgcgccatgaggccgcggaccaaagcccgcagcccggggcgcgccctgcggaacccctggagaggcttcctgccgctcaccctggctctcttcgtgggcgcgggtcatgcccaaagggaccccgtagggagatacgagccggctggtggagacgcgaatcgactgcggcgccctgggggcagctacccggcagcggctgcagccaaggtgtacagtctgttccgggagcaggacgcgcctgtcgcgggcttgcagcccgtggagcgggcccagccgggctgggggagccccaggaggcccaccgaggcggaggccaggaggccgtcccgcgcgcagcagtcgcggcgtgtccagccacctgcgcagacccggagaagcactcccctgggccagcagcaaccagcaccccggacccgggccgcgccggctctcccacgcctggggaccccacagcggtctggggctgcgcccccaaccccgccgcgagggcggctcacggggaggaacgtctgcgggggacagtgctgcccaggatggacaacagcaaacagcaccaaccactgtatcaaacccgtttgcgagccgccgtgccagaaccggggctcctgcagccgcccgcagctctgtgtctgccgctctggtttccgtggagcccgctgcgaggaggtcattcccgatgaggaatttgacccccagaactccaggctggcacctcgacgctgggccgagcgttcacccaacctgcgcaggagcagtgcggctggagagggcaccttggccagagcacagccgccagcaccacagtcgccgcccgcaccacagtcgccaccagctgggaccctgagtggcctcagccagacccacccttcccagcagcacgtggggttgtcccgcactgtccgacttcacccgactgccacggccagtagccagctctcttccaacgccctgcccccgggaccaggccttgagcagagagatggcacccaacaggcggtacctctggagcacccctcatccccctgggggctgaacctcacggagaaaatcaagaagatcaagatcgtcttcactcccaccatctgcaagcagacctgtgcccgtggacactgtgccaacagctgtgagaggggcgacaccaccaccctgtacagccagggcggccatgggcacgatcccaagtctggcttccgcatctatttctgccagatcccctgcctgaacggaggccgctgcatcggcagggacgaatgctggtgccccgccaactccaccgggaagttctgccacctgcctatcccgcagccggacagggagcctccagggagggggtcccgccccagggccttgctggaagccccactgaagcagtccactttcacactgccgctctccaaccagctggcctccgtgaacccctccctggtgaaggtgcacattcaccacccacccgaggcctcagtgcagatccaccaggtggcccaggtgcggggcggggtggaggaggccctagtggagaacagcgtggagaccagacccccgccctggctgcctgccagccctggccacagcctctgggacagcaacaacatccctgctcggtctggagagccccctcggccactgcccccagcagcacccaggcctcgaggactgctgggccggtgttacctgaacactgtgaacggacagtgtgccaaccctctgctggagctgactacccaggaggactgctgtggcagtgtgggagccttctggggggtgactttgtgtgccccatgcccacccagaccagcctccccggtgattgagaatggccagctggagtgtcctcaggggtacaagagactgaacctcactcactgccaagatatcaacgagtgcttgaccctgggcctgtgcaaggacgcggagtgtgtgaataccaggggcagctacctgtgcacatgcagacctggcctcatgctggatccatcgcggagccgctgtgtgtcggacaaggcaatctccatgctgcagggactgtgctaccggtcgctggggcccggcacctgcaccctgcctttggcccagcggatcaccaagcagatatgctgctgcagccgcgtgggcaaagcatggggcagcgagtgtgagaaatgccctctgcctggcacagaggccttcagagagatctgccctgccggccacggctacacctacgcgagctccgacatccgcctgtccatgaggaaagccgaggaggaggaactggcaaggcccccaagggagcaagggcagaggagcagcggggcactgcccgggccagcagagaggcagcccctccgggtcgtcacggacacctggcttgaggccgggaccatccctgacaagggtgactctcaggctggccaggtcacgaccagtgtcactcatgcacctgcctgggtcacagggaatgccacaaccccaccaatgcctgaacaggggattgcagagatacaggaagaacaagtgaccccctccaccgatgtgctggtgaccctgagcaccccaggcattgacagatgcgctgctggagccaccaacgtctgtggccctggaacctgcgtgaacctccccgatggatacagatgtgtctgcagccctggctaccagctgcaccccagccaggcctactgcacagatgacaacgagtgtctgagggacccctgcaagggaaaagggcgctgcatcaaccgcgtggggtcctactcctgcttctgctaccctggctacactctggccacctcaggggcgacacaggagtgtcaagatatcaatgagtgtgagcagccaggggtgtgcagcggggggcagtgcaccaacaccgagggctcgtaccactgcgagtgtgatcagggctacatcatggtcaggaaaggacactgccaagatatcaacgaatgccgtcaccccggtacctgccctgatgggagatgcgtcaattcccctggctcctacacttgtctggcctgtgaggagggctaccggggccagagtgggagctgtgtagatgtgaatgagtgtctgactcccggggtctgtgcccatggaaagtgcaccaacctagaaggctccttcagatgctcttgtgagcagggctatgaggtcacctcagatgagaagggctgccaagatgtggatgagtgtgccagccgggcctcatgccccacaggcctctgcctcaacacggagggctccttcgcctgctctgcctgtgagaacgggtactgggtgaatgaagacggcactgcctgtgaagacctagatgagtgtgccttcccgggagtctgcccctccggagtctgcaccaacacggctggctccttctcctgcaaggactgcgatgggggctaccggcccagccccctgggtgactcctgtgaagatgtggatgaatgtgaagacccccagagcagctgcctgggaggcgagtgcaagaacactgtgggctcctaccagtgcctctgtccccagggcttccagctggccaatggcaccgtgtgtgaggatgtgaatgagtgcatgggggaggagcactgcgcaccccacggcgagtgcctcaacagccacgggtctttcttctgtctgtgcgcgcctggcttcgtcagcgcagaggggggcaccagctgccaggatgtggacgagtgtgccaccacagacccgtgtgtgggagggcactgtgtcaacaccgagggctccttcaactgtctatgtgagactggcttccagccctccccagagagtggagagtgtgtggatattgacgagtgtgaggactatggagacccggtgtgtggcacctggaagtgtgaaaacagccctggctcctaccgctgtgttctgggctgccagcctggcttccacatggccccgaacggagactgcattgacatagacgagtgcgccaacgacaccatgtgtggcagccacggcttctgtgacaacactgatggctccttccgctgcctctgtgaccagggcttcgagatctctccctcaggctgggactgtgtggatgtgaacgagtgtgagcttatgctggcggtatgtggggccgcgctctgtgagaacgtggagggctccttcctgtgcctctgtgccagtgacctggaggagtacgatgcccaggaggggcactgccgcccacggggggctggaggtcagagtatgtctgaggccccaacgggggaccatgccccggcccccacccgcatggactgctactccgggcagaagggccatgcgccctgctccagtgtcctgggccggaacaccacacaggctgaatgctgctgcacccagggcgctagctggggagatgcctgtgacctctgcccgtctgaggactcagctgaattcagcgagatctgccctagtggaaaaggctacattcctgtggaaggagcctggacgtttggacagaccatgtacacagatgcggatgagtgtgtgatattcgggcctggtctctgcccgaacggccggtgcctcaacaccgtgcctggttatgtctgcctgtgcaatcccggcttccactacgatgcttcccacaagaagtgtgaggatcacgatgagtgccaggacctggcctgtgagaatggcgagtgcgtcaacacggagggctccttccactgcttctgcagccccccgctcaccctggacctcagccagcagcgctgcatgaacagcaccagcagcacggaggacctccctgaccacgacatccacatggacatctgctggaaaaaagtcaccaatgatgtgtgcagcgaacccctgcgtgggcaccgcaccacctacacggaatgctgctgccaggacggcgaggcctggagccagcagtgtgctctgtgtcccccgaggagctctgaggtctatgctcagctgtgcaacgtggctcgcattgaggcagagcgggaggccggggtccacttccggccaggctatgagtatggccccgggcccgatgacctgcactacagcatctatggcccagatggggcccccttctacaactacctgggccccgaggacaccgtccctgagcctgccttccccaacacagccggtcactcagcggaccgcacacccatccttgagtctcctttgcagccctcagaactccagccccactacgtggccagccatccagagcccccagccggcttcgaagggcttcaggcggaggagtgcggcatcctgaacggctgtgagaatggccgctgtgtgcgcgtgcgggagggctacacctgtgactgttttgagggcttccagctggatgcggcccacatggcctgcgtagatgtgaatgagtgtgatgacttgaacgggcctgctgtgctctgtgtccatggttactgcgagaacacagagggctcctaccgctgccactgctccccgggatatgtggctgaggcagggcccccccactgcactgccaaggagtagcagtcaggggtcagtgtggcaactacctggaaatggcctccagtcacaggcaggggccttgaggatgatttcctagctgggaagacaccgtgacatcaggccagaggtttccaatcagccttgcctgctttcatctctcccagcttagcctctggctgtaagcttcggtcattgcctccatgcccttgcttggctcaagcaccaccaatcgctttaatgcttcagccaccgcatgaggccctgtccaccacctttcctggccttgctatgggatgcttaccaaaggatggccctcatccaccctcccaagctgtgcgagcatgcaaggccccatggcctcacactgcagacacccctttccagccacaatccaccatcatcctgacgatcccacaactgggacagaggctacatctgccctagggaggtccttcagaatctgtggagcaagaaaggatttggggaagcttggggactgactccagagccccctcctaagaaccatcaccaccactcagccaatctgttctgggccctgattttgccacacctccatcctgtagcccattctctgaccccaaggagtggcagaagatcccttcactcagagaagcaaggctgatattagcttgttgaatgtaagagacacaaatgaagaagaacaaagagcctgagaaagcagcaagaggacatgatgaaaaatacgtggagttgatgagaaaggggagccaaggctttatacgtctaaagaaaatattcagtagctgaatccgcccagtgatagcctgtgggcaccagcagcaagggctgccatgggatacagcacccatctacaaagacctctattacataaacactgcttcttacaggaaacaaacctcttctgggatctccttttgtgaaaaccagtttgatgtgctaaaagtaaaaagtctattttccagtgtggtcttgttcagaagcagccagatttccaatgttgtttttcccctccactcagaaacccctgccctttcccttcagaaaacgatggcaggcattcctctgagtttacaagcagagactcactccaacccaaactagctgggagttcagaaccatggtggaataaagaaatgtgcatctggtctcttctgttgtttttatttcatatcagattaaatttctttaccatgttggctaagtctaaatattagagatgaggctgtgcctactccctggccagctctgctgatagcctatgatgggttccaatgggaaatgactctttactattaaaagacaaggaaagctctgacttcgtacttctctgatgaatggcaatgtaaatgaacaaggctccatgtgactggagcatggaagtgaatgctactttcttaatttaatctgccctgtcctacctgctcctctgattgttagccatcacataacttattgaatgcttgccatgtgccaggcactgtgctgagtgccatacatacatttcatttaattatccaataatcctacttactattgtttattctcaatttacaggtgaggaaactgagacatagaaagcttaaataatttgctctaggtccctatactaattgagatgttttcagcagacaaaaataagtcactcttacgcatgtaaaaatattctttcactcataataaaagaaatgcaacttaaaaccatactgagatcctttttaaaactgtcagattggcaaagatcaaaaagcttgttaagactcctagctggcaagcatgtgggaaataggtactctcataacagctgacagaagtacatattgaagaggacaatatggcaatgtccttcaaaattataaaagcactaactctttgatccagtagtttccacttctaggaacttaaccttcagatatattttcaccagatataaaatgacatacgtaagaagttattactgcatcatttgtaatagctaaagattagaaacaattaattgctatggaacccttaaaaaaggtggctctaaattccttaagaaagatatccaaaacaaattaaggggaaaagggagggttgcataacagcatgtaacataacactatttgtctaaagaatggggaaagagaagcggttgtctgttcacctcatccttgccactccgccttatacctcaccatcggagaacttaccatcccccaaatatatcctgctggcactacaccttcgtaactgctgttcccactgcccccacaacactccaatctccaccttcctgccaaccttgagatattgtatgcatatatacatatttcctttgtttaaaatacaaatagcatactatgcatgctgttctgcactttgctttttttttatacttgcaattagagctgcctcatttcattttacagctgtatactattccattgaatggataaaccataatttatttaatcagtccctcactgacagacgtttccattgtttcctgtcttttgctataaataatgctgtaatgaatattcttgtgcatatttcacattaatttatgggattacatctgcaggataaattcttagaaccaatggtggtttgtggggagggtgacagggtggataggtacaggattgggagacttttcactgtatctccttttgtatttttttgaattttgtaccatatgtatcacctattcaaaaaaaataaaatatttttaaatacaaaaaaaaaaaaaaa

SEQ ID NO: 79 - DNA, 5698 bp, Homo sapiens
aggttcaagtggagctctcctaaccgacgcgcgtctgtggagaagcggcttggtcgggggtggtctcgtggggtcctgcctgtttagtcgctttcagggttcttgagccccttcacgaccgtcaccatggaagtgtcaccattgcagcctgtaaatgaaaatatgcaagtcaacaaaataaagaaaaatgaagatgctaagaaaagactgtctgttgaaagaatctatcaaaagaaaacacaattggaacatattttgctccgcccagacacctacattggttctgtggaattagtgacccagcaaatgtgggtttacgatgaagatgttggcattaactatagggaagtcacttttgttcctggtttgtacaaaatctttgatgagattctagttaatgctgcggacaacaaacaaagggacccaaaaatgtcttgtattagagtcacaattgatccggaaaacaatttaattagtatatggaataatggaaaaggtattcctgttgttgaacacaaagttgaaaagatgtatgtcccagctctcatatttggacagctcctaacttctagtaactatgatgatgatgaaaagaaagtgacaggtggtcgaaatggctatggagccaaattgtgtaacatattcagtaccaaatttactgtggaaacagccagtagagaatacaagaaaatgttcaaacagacatggatggataatatgggaagagctggtgagatggaactcaagcccttcaatggagaagattatacatgtatcacctttcagcctgatttgtctaagtttaaaatgcaaagcctggacaaagatattgttgcactaatggtcagaagagcatatgatattgctggatccaccaaagatgtcaaagtctttcttaatggaaataaactgccagtaaaaggatttcgtagttatgtggacatgtatttgaaggacaagttggatgaaactggtaactccttgaaagtaatacatgaacaagtaaaccacaggtgggaagtgtgtttaactatgagtgaaaaaggctttcagcaaattagctttgtcaacagcattgctacatccaagggtggcagacatgttgattatgtagctgatcagattgtgactaaacttgttgatgttgtgaagaagaagaacaagggtggtgttgcagtaaaagcacatcaggtgaaaaatcacatgtggatttttgtaaatgccttaattgaaaacccaacctttgactctcagacaaaagaaaacatgactttacaacccaagagctttggatcaacatgccaattgagtgaaaaatttatcaaagctgccattggctgtggtattgtagaaagcatactaaactgggtgaagtttaaggcccaagtccagttaaacaagaagtgttcagctgtaaaacataatagaatcaagggaattcccaaactcgatgatgccaatgatgcagggggccgaaactccactgagtgtacgcttatcctgactgagggagattcagccaaaactttggctgtttcaggccttggtgtggttgggagagacaaatatggggttttccctcttagaggaaaaatactcaatgttcgagaagcttctcataagcagatcatggaaaatgctgagattaacaatatcatcaagattgtgggtcttcagtacaagaaaaactatgaagatgaagattcattgaagacgcttcgttatgggaagataatgattatgacagatcaggaccaagatggttcccacatcaaaggcttgctgattaattttatccatcacaactggccctctcttctgcgacatcgttttctggaggaatttatcactcccattgtaaaggtatctaaaaacaagcaagaaatggcattttacagccttcctgaatttgaagagtggaagagttctactccaaatcataaaaaatggaaagtcaaatattacaaaggtttgggcaccagcacatcaaaggaagctaaagaatactttgcagatatgaaaagacatcgtatccagttcaaatattctggtcctgaagatgatgctgctatcagcctggcctttagcaaaaaacagatagatgatcgaaaggaatggttaactaatttcatggaggatagaagacaacgaaagttacttgggcttcctgaggattacttgtatggacaaactaccacatatctgacatataatgacttcatcaacaaggaacttatcttgttctcaaattctgataacgagagatctatcccttctatggtggatggtttgaaaccaggtcagagaaaggttttgtttacttgcttcaaacggaatgacaagcgagaagtaaaggttgcccaattagctggatcagtggctgaaatgtcttcttatcatcatggtgagatgtcactaatgatgaccattatcaatttggctcagaattttgtgggtagcaataatctaaacctcttgcagcccattggtcagtttggtaccaggctacatggtggcaaggattctgctagtccacgatacatctttacaatgctcagctctttggctcgattgttatttccaccaaaagatgatcacacgttgaagtttttatatgatgacaaccagcgtgttgagcctgaatggtacattcctattattcccatggtgctgataaatggtgctgaaggaatcggtactgggtggtcctgcaaaatccccaactttgatgtgcgtgaaattgtaaataacatcaggcgtttgatggatggagaagaacctttgccaatgcttccaagttacaagaacttcaagggtactattgaagaactggctccaaatcaatatgtgattagtggtgaagtagctattcttaattctacaaccattgaaatctcagagcttcccgtcagaacatggacccagacatacaaagaacaagttctagaacccatgttgaatggcaccgagaagacacctcctctcataacagactatagggaataccatacagataccactgtgaaatttgttgtgaagatgactgaagaaaaactggcagaggcagagagagttggactacacaaagtcttcaaactccaaactagtctcacatgcaactctatggtgctttttgaccacgtaggctgtttaaagaaatatgacacggtgttggatattctaagagacttttttgaactcagacttaaatattatggattaagaaaagaatggctcctaggaatgcttggtgctgaatctgctaaactgaataatcaggctcgctttatcttagagaaaatagatggcaaaataatcattgaaaataagcctaagaaagaattaattaaagttctgattcagaggggatatgattcggatcctgtgaaggcctggaaagaagcccagcaaaaggttccagatgaagaagaaaatgaagagagtgacaacgaaaaggaaactgaaaagagtgactccgtaacagattctggaccaaccttcaactatcttcttgatatgcccctttggtatttaaccaaggaaaagaaagatgaactctgcaggctaagaaatgaaaaagaacaagagctggacacattaaaaagaaagagtccatcagatttgtggaaagaagacttggctacatttattgaagaattggaggctgttgaagccaaggaaaaacaagatgaacaagtcggacttcctgggaaaggggggaaggccaaggggaaaaaaacacaaatggctgaagttttgccttctccgcgtggtcaaagagtcattccacgaataaccatagaaatgaaagcagaggcagaaaagaaaaataaaaagaaaattaagaatgaaaatactgaaggaagccctcaagaagatggtgtggaactagaaggcctaaaacaaagattagaaaagaaacagaaaagagaaccaggtacaaagacaaagaaacaaactacattggcatttaagccaatcaaaaaaggaaagaagagaaatccctggtctgattcagaatcagataggagcagtgacgaaagtaattttgatgtccctccacgagaaacagagccacggagagcagcaacaaaaacaaaattcacaatggatttggattcagatgaagatttctcagattttgatgaaaaaactgatgatgaagattttgtcccatcagatgctagtccacctaagaccaaaacttccccaaaacttagtaacaaagaactgaaaccacagaaaagtgtcgtgtcagaccttgaagctgatgatgttaagggcagtgtaccactgtcttcaagccctcctgctacacatttcccagatgaaactgaaattacaaacccagttcctaaaaagaatgtgacagtgaagaagacagcagcaaaaagtcagtcttccacctccactaccggtgccaaaaaaagggctgccccaaaaggaactaaaagggatccagctttgaattctggtgtctctcaaaagcctgatcctgccaaaaccaagaatcgccgcaaaaggaagccatccacttctgatgattctgactctaattttgagaaaattgtttcgaaagcagtcacaagcaagaaatccaagggggagagtgatgacttccatatggactttgactcagctgtggctcctcgggcaaaatctgtacgggcaaagaaacctataaagtacctggaagagtcagatgaagatgatctgttttaaaatgtgaggcgattattttaagtaattatcttaccaagcccaagactggttttaaagttacctgaagctcttaacttcctcccctctgaatttagtttggggaaggtgtttttagtacaagacatcaaagtgaagtaaagcccaagtgttctttagctttttataatactgtctaaatagtgaccatctcatgggcattgttttcttctctgctttgtctgtgttttgagtctgctttcttttgtctttaaaacctgatttttaagttcttctgaactgtagaaatagctatctgatcacttcagcgtaaagcagtgtgtttattaaccatccactaagctaaaactagagcagtttgatttaaaagtgtcactcttcctccttttctactttcagtagatatgagatagagcataattatctgttttatcttagttttatacataatttaccatcagatagaactttatggttctagtacagatactctactacactcagcctcttatgtgccaagtttttctttaagcaatgagaaattgctcatgttcttcatcttctcaaatcatcagaggccaaagaaaaacactttggctgtgtctataacttgacacagtcaatagaatgaagaaaattagagtagttatgtgattatttcagctcttgacctgtcccctctggctgcctctgagtctgaatctcccaaagagagaaaccaatttctaagaggactggattgcagaagactcggggacaacatttgatccaagatcttaaatgttatattgataaccatgctcagcaatgagctattagattcattttgggaaatctccataatttcaatttgtaaactttgttaagacctgtctacattgttatatgtgtgtgacttgagtaatgttatcaacgtttttgtaaatatttactatgtttttctattagctaaattccaacaattttgtactttaataaa

SEQ ID NO: 80 - DNA, 4157 bp, Homo sapiens
agcggggcggggcgccagcgctgccttttctcctgccgggtagtttcgctttcctgcgcagagtctgcggaggggctcggctgcaccggggggatcgcgcctggcagaccccagaccgagcagaggcgacccagcgcgctcgggagaggctgcaccgccgcgcccccgcctagcccttccggatcctgcgcgcagaaaagtttcatttgctgtatgccatcctcgagagctgtctaggttaacgttcgcactctgtgtatataacctcgacagtcttggcacctaacgtgctgtgcgtagctgctcctttggttgaatccccaggcccttgttggggcacaaggtggcaggatgtctcagtggtacgaacttcagcagcttgactcaaaattcctggagcaggttcaccagctttatgatgacagttttcccatggaaatcagacagtacctggcacagtggttagaaaagcaagactgggagcacgctgccaatgatgtttcatttgccaccatccgttttcatgacctcctgtcacagctggatgatcaatatagtcgcttttctttggagaataacttcttgctacagcataacataaggaaaagcaagcgtaatcttcaggataattttcaggaagacccaatccagatgtctatgatcatttacagctgtctgaaggaagaaaggaaaattctggaaaacgcccagagatttaatcaggctcagtcggggaatattcagagcacagtgatgttagacaaacagaaagagcttgacagtaaagtcagaaatgtgaaggacaaggttatgtgtatagagcatgaaatcaagagcctggaagatttacaagatgaatatgacttcaaatgcaaaaccttgcagaacagagaacacgagaccaatggtgtggcaaagagtgatcagaaacaagaacagctgttactcaagaagatgtatttaatgcttgacaataagagaaaggaagtagttcacaaaataatagagttgctgaatgtcactgaacttacccagaatgccctgattaatgatgaactagtggagtggaagcggagacagcagagcgcctgtattggggggccgcccaatgcttgcttggatcagctgcagaactggttcactatagttgcggagagtctgcagcaagttcggcagcagcttaaaaagttggaggaattggaacagaaatacacctacgaacatgaccctatcacaaaaaacaaacaagtgttatgggaccgcaccttcagtcttttccagcagctcattcagagctcgtttgtggtggaaagacagccctgcatgccaacgcaccctcagaggccgctggtcttgaagacaggggtccagttcactgtgaagttgagactgttggtgaaattgcaagagctgaattataatttgaaagtcaaagtcttatttgataaagatgtgaatgagagaaatacagtaaaaggatttaggaagttcaacattttgggcacgcacacaaaagtgatgaacatggaggagtccaccaatggcagtctggcggctgaatttcggcacctgcaattgaaagaacagaaaaatgctggcaccagaacgaatgagggtcctctcatcgttactgaagagcttcactcccttagttttgaaacccaattgtgccagcctggtttggtaattgacctcgagacgacctctctgcccgttgtggtgatctccaacgtcagccagctcccgagcggttgggcctccatcctttggtacaacatgctggtggcggaacccaggaatctgtccttcttcctgactccaccatgtgcacgatgggctcagctttcagaagtgctgagttggcagttttcttctgtcaccaaaagaggtctcaatgtggaccagctgaacatgttgggagagaagcttcttggtcctaacgccagccccgatggtctcattccgtggacgaggttttgtaaggaaaatataaatgataaaaattttcccttctggctttggattgaaagcatcctagaactcattaaaaaacacctgctccctctctggaatgatgggtgcatcatgggcttcatcagcaaggagcgagagcgtgccctgttgaaggaccagcagccggggaccttcctgctgcggttcagtgagagctcccgggaaggggccatcacattcacatgggtggagcggtcccagaacggaggcgaacctgacttccatgcggttgaaccctacacgaagaaagaactttctgctgttactttccctgacatcattcgcaattacaaagtcatggctgctgagaatattcctgagaatcccctgaagtatctgtatccaaatattgacaaagaccatgcctttggaaagtattactccaggccaaaggaagcaccagagccaatggaacttgatggccctaaaggaactggatatatcaagactgagttgatttctgtgtctgaagttcacccttctagacttcagaccacagacaacctgctccccatgtctcctgaggagtttgacgaggtgtctcggatagtgggctctgtagaattcgacagtatgatgaacacagtatagagcatgaatttttttcatcttctctggcgacagttttccttctcatctgtgattccctcctgctactctgttccttcacatcctgtgtttctagggaaatgaaagaaaggccagcaaattcgctgcaacctgttgatagcaagtgaatttttctctaactcagaaacatcagttactctgaagggcatcatgcatcttactgaaggtaaaattgaaaggcattctctgaagagtgggtttcacaagtgaaaaacatccagatacacccaaagtatcaggacgagaatgagggtcctttgggaaaggagaagttaagcaacatctagcaaatgttatgcataaagtcagtgcccaactgttataggttgttggataaatcagtggttatttagggaactgcttgacgtaggaacggtaaatttctgtgggagaattcttacatgttttctttgctttaagtgtaactggcagttttccattggtttacctgtgaaatagttcaaagccaagtttatatacaattatatcagtcctctttcaaaggtagccatcatggatctggtagggggaaaatgtgtattttattacatctttcacattggctatttaaagacaaagacaaattctgtttcttgagaagagaatattagctttactgtttgttatggcttaatgacactagctaatatcaatagaaggatgtacatttccaaattcacaagttgtgtttgatatccaaagctgaatacattctgctttcatcttggtcacatacaattatttttacagttctcccaagggagttaggctattcacaaccactcattcaaaagttgaaattaaccatagatgtagataaactcagaaatttaattcatgtttcttaaatgggctactttgtcctttttgttattagggtggtatttagtctattagccacaaaattgggaaaggagtagaaaaagcagtaactgacaacttgaataatacaccagagataatatgagaatcagatcatttcaaaactcatttcctatgtaactgcattgagaactgcatatgtttcgctgatatatgtgtttttcacatttgcgaatggttccattctctctcctgtactttttccagacacttttttgagtggatgatgtttcgtgaagtatactgtatttttacctttttccttccttatcactgacacaaaaagtagattaagagatgggtttgacaaggttcttcccttttacatactgctgtctatgtggctgtatcttgtttttccactactgctaccacaactatattatcatgcaaatgctgtattcttctttggtggagataaagatttcttgagttttgttttaaaattaaagctaaagtatctgtattgcattaaatataatatgcacacagtgctttccgtggcactgcatacaatctgaggcctcctctctcagtttttatatagatggcgagaacctaagtttcagttgattttacaattgaaatgactaaaaaacaaagaagacaacattaaaacaatattgtttcta

SEQ ID NO: 81 - DNA, 1302 bp, Homo sapiens
gagacagcccgccggccgcccggatctccacctgccaccccagagctgggacagcagccgggctgcggcactgggagggagaccccacagtggcctcttctgccacccacgcccccacccctggcatggccgaccagctgactgaggagcaggtcacagaattcaaggaggccttctccctgtttgacaaggatggggacggctgcatcaccacccgcgagctgggcacggtcatgcggtccctgggccagaaccccacggaggccgagctgcgggacatgatgagtgagatcgaccgggacggcaacggcaccgtggacttccccgagttcctgggcatgatggccaggaagatgaaggacacggacaacgaggaggagatccgcgaggccttccgcgtgttcgacaaggacggcaacggcttcgtcagcgccgccgagctgcgacacgtcatgacccggctgggggagaagctgagtgacgaggaggtggacgagatgatccgggccgcggacacggacggagacggacaggtgaactacgaggagtttgtccgtgtgctggtgtccaagtgaggccggcgcccaccatgctcctgggcgcccacgcggcccacagggcaagaacccggggcctcccgcctcctcccccatccccctgcctcccctgggcactgtggcttcctcctgcgcctggttgattcagcccacctctctgcatcccgcttcccgcgtctcttctctgcactcctgccgaccttcccacctgctcatctgaatgacacggaacgctcccactgcaggcaaaccgtgacgccctccccactcgggagaagcagagctgaccttaggaccgagcaccagggcaggttgcgctgactctgcggccctccaggacggacaccgggtgaccccttagggcacccaggcaagatccctaagaggcacccaatgcccaggccaggggggctgcagccctcagcccccgccaggattcccgcaggctcctggactggaagctccctccgcggtcggattctggagggtgggaggcatcttggcctgcagtaagcggtgctgacggggactctggccacagaggtcaggcctcctgaaaacagcactgccttccgcgctgccccagcttgccccattccttgtccgccaacccaccgtgattcatcttctgaagctgggagtgaaactgggtcagctgtaacctgttcctattcatctggaaggagggaggcttggatgagcaggggatgagagctgcagggaaataaatgagatattcgtcctt

SEQ ID NO: 82 - DNA, 4468 bp, Homo sapiens
gatttcctgagcatgcctagggaatgacaggcatctccacaggcaggctgcatccaccttggctggggtgtcgtcattggctgcctattagaaaaacgacaggacaatgcataccaccgcctcccgactgtaaacataggggatatgtgttcacttagcatggacttctgggaggggccaaggaagggcggtctggagttttattgaatagagcagtgtgtattcggctgcctgcctgcccgcctgcttgctctctggctgtgctcctgcttaaagaaatcagtccttcctttccgacttagtcctcgggaagaagtttcagactacaaggtatcattggaacatttcaagatcatcaaatcaaattccacagggattggtgaccaaccagaaggctcagacatctgattgctgacctgtccagacatcatctggtctccctgaacctgaaatcacaccatggatgattttgagcgtcgcagagaacttagaaggcaaaagagggaggagatgcgactcgaagcagaaagaatcgcctaccagaggaatgacgatgatgaagaggaggcagcccgggaacggcgccgccgagcccgacaggaacggctgcggcagaagcaggaggaagaatccttgggacaggtgaccgaccaggtggaggtgaatgcccagaacagtgtgcctgacgaggaggccaagacaaccaccacaaacactcaagtggaaggggatgatgaggccgcattcctggagcgcctggctcggcgtgaggaaagacgccaaaaacgccttcaggaggctctggagcggcagaaggagttcgacccaacaataacagatgcaagtctgtcgctcccaagcagaagaatgcaaaatgacacagcagaaaatgaaactaccgagaaggaagaaaaaagtgaaagtcgccaagaaagatacgagatagaggaaacagaaacagtcaccaagtcctaccagaagaatgattggagggatgctgaagaaaacaagaaagaagacaaggaaaaggaggaggaggaagaggagaagccaaagcgagggagcattggagaaaatcagatcaaagatgaaaagattaaaaaggacaaagaacccaaagaagaagttaagagcttcatggatcgaaagaagggatttacagaagttaagtcgcagaatggagaattcatgacccacaaacttaaacatactgagaatactttcagccgccctggagggagggccagcgtggacaccaaggaggctgagggcgccccccaggtggaagccggcaaaaggctggaggagcttcgtcgtcgtcgcggggagaccgagagcgaagagttcgagaagctcaaacagaagcagcaggaggcggctttggagctggaggaactcaagaaaaagagggaggagagaaggaaggtcctggaggaggaagagcagaggaggaagcaggaggaagccgatcgaaaactcagagaggaggaagagaagaggaggctaaaggaagagattgaaaggcgaagagcagaagctgctgagaaacgccagaagatgccagaagatggcttgtcagatgacaagaaaccattcaagtgtttcactcctaaaggttcatctctcaagatagaagagcgagcagaatttttgaataagtctgtgcagaaaagcagtggtgtcaaatcgacccatcaagcagcaatagtctccaagattgacagcagactggagcagtataccagtgcaattgagggaacaaaaagcgcaaaacctacaaagccggcagcctcggatcttcctgttcctgctgaaggtgtacgcaacatcaagagtatgtgggagaaagggaatgtgttttcatcccccactgcagcaggcacaccaaataaggaaactgctggcttgaaggtaggggtttctagccgcatcaatgaatggctaactaaaaccccagatggaaacaagtcacctgctcccaaaccttctgacttgagaccaggagacgtatccagcaagcggaacctctgggaaaagcaatctgtggataaggtcacttcccccactaaggtttgagacagttccagaaagaacccaagctcaagacgcaggacgagctcagttgtagagggctaattcgctctgttttgtatttatgttgatttactaaattgggttcattatcttttatttttcaatatcccagtaaacccatgtatattatcactatatttaataatcacagtctagagatgttcatggtaaaagtactgcctttgcacaggagcctgtttctaaagaaacccatgctgtgaaatagagacttttctactgatcatcataactctgtatctgagcagtgataccaaccacatctgaagtcaacagaagatccaagtttaaaattgcctgcggaatgtgtgcagtatctagaaaaatgaaccgtagtttttgtttttttaaatacagaagtcatgttgtttctgcactttataataaagcatggaagaaattatcttagtaggcaattgtaacactttttgaaagtaacccatttcagatttgaaatactgcaataatggttgtctttaaaaaaaaaaaagaaatgtactgttaaggtattactttttttcatgctgatgattcatatctaaattacattattatgttagctgacagtggtactgattttttaggttggttgttttgtggatttctttagtagtgatagtagcctgaaccacattttagataactcaattatgtatgtatgtgcatacacatatacaaacacactaatggtagaatgcttttttatgtgctagactattatatttagtagtatgtcattgtaactagccaatatcacagcttttgaaaaattaaaaaatcacactatattaatatttcatatttgccaacagaaacatggcagataggtatcaatatgttttcaatgcctgatgacctataagaagaaagtattgaaaagaagagagattagaactgttagaaggagttgaaattttctaaaagacatagtatttagtttataattaaatgcattcttgaagtccagtgtgaattttattaatgctatcatctcgaccaagctcaaagcctacttattagaaacaatgaagttcacaataggtcataaggtctcttccttttctaaaattgaaagacaagaaatttagtgccaatattgtacagacagaaattccatgtatgagtctcaacaaagactacctttggctaaatgtctagaagcagagaagtaaagtgagcaaaatccagtgttgaggagtcatgacagtactttgatctttatatactctgaagcatttcttcaaacttttctacttttatttgtcattgatacctgtagtaagttgacaatgtggtgaaatttcaaaattatatgtaacttctactagttttactttctcccccaagtcttttttaactcatgatttttacacacacaatccagaacttattatatagcctctaagtctttattcttcacagtagataatgaaagagtcctccagtgtcttggcaaaatgttctagtatagctggatacatacagtggagttctataaactcatacctcagtggacttaaccaaaattgtgttagtctcaattcctaccacactgagggagcctcccaaataactattttcttatctgcagtattcctccagaagagctaaccagggcagggctggcatgagaagtgacatctgcgttacaaagtctatcttcctcataagtctgtaaagagcaattgaatcttctagctttagcaaacctaagccaaaggaaggaaagccacgaagaatgcagaagtcaaaccctcatgacaaagtaggcacaagtctacaataagctaaatcagaatttacaaatacaagtgtcccaggtagcattgactcccgtcattggagtgaaatggatcaaagtttgaattaaggcctatggtaaggtaacattgctttgttgtacttttgaacaagagctcctcctgatcactattacatatttttctagaaaatctaaagttcagaagagaatgtatcactgctgacttttattccaatatttggatggagtaagttttagggtagaattttgttcagtttggatttaatcttttgaaaagtaaattccttgtttactggtttgactataattctctgttatctttacgaggtaaaactgcaagctgactagcatgttctgtgaatctgccattcctaaaaattttataaacacttgatacttttcactgataatggatcgctccaataaacatatattgtgaaaatgcatccacaataaatggaattccttcctgcaaaatgtctttttctcacttatttttatgtacaatattgatagtgagaggtatgtctattataataaagattatggcacagtaaaaaaaaaaaaaaaaaa

SEQ ID NO: 83 - DNA, 4810 bp, Homo sapiens
ggtcgccgcggtgctgctgctcagtgggagcgggtcttcgcaactgtctccgcgtggcgcgcgcctctagccgcccttcccctggcggctacggccggagggagcggaggcgagcgggagtcgggctccatggagagcggcggacaactgggcagaggcggagctttcatctcggcaccctggttccagtgacccgcgctagcgtcccgtcccgcccgcgtcggagcggccgccggccccgggactgaccggcctcgccgcacctcccgcaccgactagcgctcccgggcgctcctgcgcccgactcgccctcgcccccactccccggcggggtggcggcggccgggcccccacggcggcggccggagcagcagcagcagcagcaggagcccgcctctatgatgaagttcaagcccaaccagacgcggacctacgaccgcgagggcttcaagaagcgggcggcgtgcctgtgcttccggagcgagcaggaggacgaggtgctgctggtgagtagcagccggtacccagaccagtggattgtcccaggaggaggaatggaacccgaggaggaacctggcggtgctgccgtgagggaagtttatgaggaggctggagtcaaaggaaaactaggcagacttctgggcatatttgagaaccaagaccgaaagcacagaacatatgtttatgttctaacagtcactgaaatattagaagattgggaagattctgttaatattggaaggaagagagagtggttcaaagtagaagatgctatcaaagttctccagtgtcataaacctgtacatgcagagtatctggaaaagctaaagctgggttgttccccagccaatggaaattctacagtcccttcccttccggataataatgccttgtttgtaaccgctgcacagacctctgggttgccatctagtgtaagatagagagaactgggtaggcctctcccaccatgtgcagtctcatggggagaggcttctttcgtttcctcgtcaaacatctgattgacgcttgcaaactgtctgaatttgccatgcaaggttttcaaacaatttgcatgtttttcagatgctttcaaatctttttttaaaaaaatagtgtaaaatattttaataagccaaagccatgtggaatttttgtttagatgccttaactgtgccacaccccacaaccccctatattattttggttgtctatttctcacagcatattttcagttttttgtccatttgacatcagtctgtggtttattttgtcatcagattacttgtgggtatacctaccccaaaattgttttctcattcacagcattagcatattcagcaaatccatctgtggtgggaattaaaaatattattggtattaaagaaatccattcaccccaaaacttgttttacaggattacaattttaattcaaaatttccagatttgggctatttctgtatgatccaataacttattttgtcacagggcttaatttgccatttttggggatttgtcgactcattttgtctgaattttcacaactggtattatgtcactagctacctgatacggctatttcccttataactcaatagtaccttaacacaaagtataactctgtagagttggtgaatattttagggaaatattagcaaaatgcatgtagtaaagacatcttatgaaaactgtattcatggaatttgatttagcatgctcagttgccagttcccattatcgatactctttctttgcagaataccttagaaccgttatttccctcagtgtagattgctcttaaaatgtattcagttatttagtggcccccacaggagtggagtcttgaaatctaattctaaatgccagtcagtgatgatcgcatcacagttgagtgaaatggccttcctgttcagctgttagagactgaagattgttagggcaccttagaatgtctcatcttttctaggttgtcaacaggtactatttgtcacataactaactttcgaggcactggaacatacctgaactaagaattaaatcttttactttatactcacttaaaatcaagaatcccatctaaaacacataggtaccttatctgaaactcttgcacttccccaaccagggcagaaatgaggtgggagaagtttgactaaaatgagggatgggggaaagtaaaagatgtttttttttttttgagactcgctttgtcacccaggctggagtgcaatggcacaatctcaactcaccgcaacctccgcctcccgggttcaagcgattctcctgcctcagcctcccgagtagttgggattacaggcgcctgcctccatgcctggctaattttgtatttttagtagagacagggtttcttcatgttggtcaggctggtctcaaactcctaacctcgtgatccgcctgcctcgacctcccaaagtgctgggattacaggcatgagccaccatgcccagccaaagatcatttttttatatagacttcagccctttgtaaatattgtaactggggagtatagagtagaaaaaaagtatagttaaaacatttgttctacaaattaacctttaaaaatataattactgctaaaaatagagtgctgttacacttaaggaaaattagtgccattttggaaatgagatcttgtgccataaatacagctgaactgaatataaatgttcacaaattaatgctgtcaaaggaatgagtaaagcagaaaaacttttaaccagcaacatttcaagtacgtagtgtgatcaaacatgatcatccagaatttttatatttttttctttgtacagaggttacatattctgggtgttcttttataaaggaaacattttaaatcccacaaattgacactttctatcttcaatggactaagatttttttggtcagtaatctctgaaatttccttaaattatatacttaacatagcagagaaactggattgtttttgtatataagactgcttccacctgaaatgctgtcataagtactgggggggtgggggagtgcccatcttgtacatgatattcttagaggtaataaggtaatgatgcatgaatttattttataaactcttggactatgtatttgacatgtaaaatatgtacagtattaacgtcaaccatctctttaaagttagcctataaatattgttgtataattttctttggtcagaaacacttggactgaatagtgacactcggtaaggattttcagtgccatttagcaaaacgtctttagtctatgcaactagcaaaaatctgcataatgcaacaacacagttttcacacttcaaattttacatgaggggttcttcacgattctcctggaacccagtctagcaaaatgagaggaaaggccctagggagatttatttctgttaaatagttaactctgctgagtatgacaaatagtgtctactatctcaaccctccaaaatttgcagagtgttgggactgtcatttgtgattttttttttttttttttggtggggtagttgaataaaattgggcagctaaatttttcagttccatgtgcctcccaaataaaaaacagaaaataagtagtttttgtgaattgacttgcagacaaagtagaaactgtgctgcatgatgttattttgtaaacagatgacattttctgaccaggcacatgccatccaattttctgtcaatcacactgttgtataaagcagcagaactgaaggggaaaaatgattgttgtatacactgaattgctttgcatggtctcatttgagataattgatgtaagaatcctgacttttttatatttggaaacatcaaataaaaatggaaaaaatgatcatggctttaaaaaaaaaacaaaaacacacacacatgaactcagatttgcaaaccaggtttctgaaactttgggtaaggtgtatgcttttaactttgaaatgtataaacacccagcggaaacgtatacctttcagtgcatagtgcattgtgtgcttaccctgggttgtttaaacttgtgttcaaatattccccctccaagtgaaagcctgtcgggaattccacagtaacacctttactgttctcccattgatgatcatatacgttacctcttcctagcggtacatttgtatgatccttactactggaattaccgggttaaaaggaaatgcttaccactaagatgtcagtattctcctcatggatattttcagtctcaatgttgccagtctaatagtatagtatgtggttgctttactgctgttctccccacccccgtggagttgtgtcattattttaatgaatgtgagctcttgacttactctagaattctaatacagatactttctgcactagtatcacttttattattgcagttccatttaaaagcataactggctaagtcaccgccccacccgccgcattacatttcctaaaacatactgctgccaaagaccaactgtagaatccttaagtcctgttcaagtgtcacttcattttttattaggggtttcttagttggagggcatgagaaacttggccctttccaatgttgtcttcacattggagtataagaattctctataggactctttaatttttttttttttttggtagagatggggtcttgctgtgttgcccaggctggtctcaaactcctaggcttaagcagtcctccagcctcagccttctcaaagtgctaggatgattggcatgagccacctcgtctggcctgcaggtctttttaagcatttgctgttcaataataagcatcttctttatgcctagtatttgtgataagagcacaaaacaa

SEQ ID NO: 84 - DNA, 1270 bp, Homo sapiens
attttctaaaagggacagagagcaccctgctacatttcctaatcaagaagttggcgtgcagctgggagagctagactaagttggtcatgatgcagaagctactcaaatgcagtcggcttgtcctggctcttgccctcatcctggttctggaatcctcagttcaaggttatcctacgcggagagccaggtaccaatgggtgcgctgcaatccagacagtaattctgcaaactgccttgaagaaaaaggaccaatgttcgaactacttccaggtgaatccaacaagatcccccgtctgaggactgacctttttccaaagacgagaatccaggacttgaatcgtatcttcccactttctgaggactactctggatcaggcttcggctccggctccggctctggatcaggatctgggagtggcttcctaacggaaatggaacaggattaccaactagtagacgaaagtgatgctttccatgacaaccttaggtctcttgacaggaatctgccctcagacagccaggacttgggtcaacatggattagaagaggattttatgttataaaagaggattttcccaccttgacaccaggcaatgtagttagcatattttatgtaccatggttatatgattaatcttgggacaaagaattttatagaaatttttaaacatctgaaaaagaagcttaagttttatcatccttttttttctcatgaattcttaaaggattatgctttaatgctgttatctattttattgttcttgaaaatacctgcattttttggtatcatgttcaaccaacatcattatgaaattaattagattcccatggccataaaatggctttaaagaatatatatatatttttaaagtagcttgagaagcaaattggcaggtaatatttcatacctaaattaagactctgacttggattgtgaattataatgatatgccccttttcttataaaaacaaaaaaaaaaataatgaaacacagtgaatttgtagagtgggggtatttgacatattttacagggtggagtgtactatatactattacctttgaatgtgtttgcagagctagtggatgtgtttgtctacaagtatgattgctgttacataacaccccaaattaactcccaaattaaaacacagttgtgctgtcaatacctcatactgctttacctttttttcctggatatctgtgtattttcaaatgttactatatattaaagcagaaatataaccaaaggttaaaaaaaaaaaaaaaaaa

SEQ ID NO: 85 - DNA, 3524 bp, Homo sapiens
gtcatctgtggaggagaaaagtcacatccagctccttcatgttgctgccgatgtgggattttcctggcttcgtcagccaagcaattggctgcctttgccggaggctttgagaaccaaggcttgaaggccggcaggagcatccagggggaagcttggcttcagggaggacctagcagacgttgggccggagcactagcctcacggagaaggatctgaaagaagccaaggcgcggagccagcagattgcagcccagctgaccacccctcccagctccaattcccgtggcgtccagctcttcaacaggcgccggcagagggtgaacgagttcaccttggagagccacggccagaggggacagaagcccagccaggagtccctcagagtgctcccttcaagcctcccaggccatgcaccggggctcagcctgagttccacctcgctgccggagccaggccctccacggcaccccagtccccagagccccgacagaggggtccctggccacagcatggaggggtactcagaggaggctagcttgctgcggcacctggagaaggtggccagtgaggaggaagaggtaccactggtggtttatctaaaggagaatgcagcactgctgacagccaatgggctgcacctgtcccaaaaccgagaggcccagcagtcctcaccggccccacctccagctgaggtccacagcccagctgcagatgtcaaccaaaaccttgcctcgcccagtgccacgctcaccacaccaacttctaacagcagccacaatccgccagccaccgatgtcaatcagaacccaccggcaactgttgtcccacagagcctgccactttctagcatccaacagaattcctcagaggcccaactcccatctaatggcacagggcctgcttccaaacccagcaccctgtgtgctgatgggcaaccccaggcaccggctgaggaggtgagatgcagcacactcctaattgacaaggtatcaactccagctaccaccaccagcaccttctccagagaagctacgctcatccccagctccaggcccccagcctcagatttcatgtccagctccctgctcattgacatccagcccaacaccctagtggtgtcagcagatcaagagatgtctgggcgagcagctgccaccacgcccaccaaggtctacagtgaggtccacttcacactggccaagcccccatcagtggtcaacaggacggccaggccttttgggatccaggcgccagggggcaccagccagatggagaggagccccatgctagagagacgacattttggggagaaggccccggctccccagccccccagtttgccagacaggagcccccggccacagagacacataatgtcccgcagccccatggtggaaaggaggatgatggggcagcgaagcccggcctcagagagacgccccttggggaacttcactgcaccccccacctacactgagaccttgtccacagcccctctggcttcctgggtgaggtctcctccctcatattctgtcctgtatcccagctccgaccccaagtcttctcatctgaagggccaggcggttcctgccagcaagacgggcattctggaggagtcgatggcccgccggggcagccgcaaatccatgtttactttcgtggagaagcccaaggtgaccccgaatccagacttgctggatctggtacagacagcggatgagaagcggcggcagagggaccagggggaggtaggcgtggaggaggagcccttcgcactgggggccgaggcctccaacttccagcaggagccagcacctcgtgacagggccagccccgcggcggcggaggaggtggtaccagagtgggcctcctgcctcaagtcaccccgcatccaggccaagccgaagcccaaacccaaccagaacctctccgaggcctctgggaagggagctgagctctacgcccgccgccagtcacggatggagaaatatgtcatcgagtcttcaagccacacgccagagctggcccgctgcccatcacctaccatgtccctgccttcctcctggaaataccccactaacgcccccggggccttccgagtggcatcccgaagcccagcccggaccccgcctgcctccctctaccatggctacctgcctgagaacggggtcctgcgcccagagcccaccaagcagccgccataccagctgcgcccctcgctctttgtcctctcacctatcaaggagcctgccaaggtctcaccaagagctgcctcgcccgccaagcccagctccttggacctggtgcccaacctgcccaagggggctctccctccatctcctgccctgcctcggccctcgcgctcctcaccgggcctctacacctcccccggccaggacagcctgcagcccactgccgtgagccctccttacggcggtgacatctcccccgtgtctccctccagggcgtggtctccccgagccaagcaggcccccaggccctccttctctacccggaacgccgggatcgaggctcaggaccgccgggagagcctgcccacctccccaccctggacgccgggcgcgtcccggccccccagcagcctagacggctgggtgagcccgggcccgtgggagccaggtcgcgggagcagcatgagcagccccccgccgctgccgccgccaccgcccatgtctccctcgtggagcgagcgctcggtgtccccgctgcgacctgagaccgaggcgcggccccccagccgccagctgcaggcgcttctggcgcgaaacatcatcaatgcggcccggcgcaagagcgcctccccgcggtcggcgggcgccgagaacccgcggcccttctccccgccgagggcgccaccgcccccgcccccgcccccgcccccgcccccgcgcatgcgctcgccacagcccgcccgccccggctcggctgctgtgccgggggcagccttcgcgcccatcccgcggagcccgttgcccgccggtccttcgtcctgcaccagtccccggagcccgctgcccgcgcctcccaggcccttcctctaccgccgctcgcccacggactccgacgtgtccctcgactccgaggactccggggctaagtctccaggcatcctgggctacaatatctgtccccgcgggtggaatggcagccttcggctcaagcgtggcagcctccccgccgaggcctcctgcaccacctagagccccacccccgaccccaccccgggagggcagagccagaagaaggctcattagacctgggggacccaaagggtctggcctctttgggcagccccagagatgaggggtcagcagaggagagctctggggttggggatgggttagggacgcaagcttgagttctagcccttgctctcattcagctgttgtgtgaccctgggtaagacccttccttgtttgaccctcagctttcccatctgtttaatggtggctttggccaaggcaatccacaaacgtcaaaattccccttcccatcagtacaca

SEQ ID NO: 86 - DNA, 3743 bp, Homo sapiens
ggcggtgcttgcaggtggcagccaagagcctcctggcacagcggcaccaggcaggtgacgcctattggaccccagaggtcatcccagctccagacgtggacacattttcttccaatgatgtctacggatgaggaaactgaggcctggagaggttaaagagacccgttcagagtcctacagtggtagactggtcttctgaggacctctgccctctacacagcggcctcttcaggtgcagggaggaaatggaagcacgttctatgctggttccaccccaggcatctgtgtgcttcgaggatgtggctatggcattcacacaggaggagtgggaacagctggacctggcccagaggacactgtaccgagaggtgacactggagacctgggagcatattgtctccctggggcttttcctttccaaatctgatgtgatctctcagctggagcaagaagaggacctgtgcagggcagagcaggaggccccccgagactggaaagctccacttgaggagaatgggttgaattctgaaaaagatcgagctagggaagaactatcccaccacgtggaagtgtacaggagtggaccggaggagccaccctctttggtattaggaaaagtgcaagatcagagcaaccagttaagggaacaccaggagaactccttgaggttcatggtactcacctcagagagactgtttgctcaaagggaacattgtgagcttgaacttgggggaggttattctctaccttctactttaagccttctacctacaacattacctacaagtacaggtttccctaagcccaactcacaagttaaagagttgaaacaaaattcagctttcattaatcatgagaaaaatggagcagatgggaagcactgtgagagtcatcagtgtgctagagctttctgtcagagtatttacttgagtaaacttggaaacgttgaaacaggaaagaaaaacccttatgaatatattgtcagtggtgactctctcaactatggttcctccctttgttttcatggtagaactttttcagtgaagaaaagtgatgactgtaaggattatggaaacctcttcagtcacagtgtgtctctgaatgaacagaagccagtgcattttgggaaaagtcagtatgagtgtgatgagtgcagggaaacctgttctgagagtctgtgccttgtacaaacagaaagaagtggccctggagagacccccttcagatgtgaggaacgctgtgctgccttccccatggcctcatctttttctgactgtaacatcatactgactacagagaagccatctgtgtgtaatcagtgtggaaaatctttcagctgttgtaagctcatacaccagagaacacacactggagaaaagcccttcgaatgtactcagtgtgggaaatcttttagccagagctatgaccttgtcatacatcagaggacacacactggagagaagccctatgagtgtgacctgtgtgggaaatccttcacccagagatccaaacttattacacatcagcgaattcacactggagaaaaaccgtatcagtgtattgaatgcagaaaatccttcacgtggaactctaacctcattgtacatcagagaattcatactggagagaaaccgtatgagtgcactcactgtggaaagtccttcagccaaagctatgagttagttacacataaaagaactcacactggagaaaagcccttcaaatgtactcagtgtgggaaatctttcagccagaagtatgaccttgttgtacatcagaggacacacactggagagaagccctatgagtgcaacctgtgtgggaaatccttctcccagagttccaaacttattacgcatcagcgaattcacactggagaaaaaccgtatcagtgtattgaatgtgggaaatccttcagatggaactctaacctcgtcatacatcagagaattcatactggagagaaaccgtacgattgcactcactgtggaaagtccttcagccaaagctatcggttagttgcacataaaagaactcacactggagaaaagccctatgaatgtaacgagtgtggaaaagccttcaatcgaagcactcagctcatcaggcatctgcaaattcacactggggagaagccgtacaaatgcaatcagtgcaataaagcctttgcaaggagctcctaccttgtgatgcatcagagaactcacactggtgagaaaccttttgagtgtagtcagtgtgggaaagccttttcagggagctctaaccttctttcccatcacagaattcattctggagagaaaccctatgaatgtagtgactgtgggaaatccttccggcagcgatctcaactagtagtgcatcggcggacacatactggagagaaaccttaggagtgcagtcattgtgggaaagctttcatccagaggtctcccctcatcatgcaccagaggacgcatgtcggtgggaagagctatcagtgcgacgtgtattaagcagcggttgtgactcattgaacatcagaggacatatcctggagaaaagccctacgaatgcattgattgtgggaaagccttcaatgatcgctcaacccttagtaaacacgagaggacacacactggaggcaaaccctatgaatgtgaccattgcgagaaagcctttagccaacggtgtcaacttactaggcagcagagaattcatactggagagaagccctgtgaatgttaacaaatgtggaaaagcttccagttatgatactttccttattcaacatgagaaagctcatgggcaagaaactctatgaataaccaagatggagccgggtgcagttgccaacacctgtaatcccagcaccttgcgaggccgaggcaggtggatcacttgagcccaggagtttgaaaccagcctgggtaacatggcaaaatcctgtctacaaaaaatacaaaaattagcctagcatggtggcgcatacctgtagtcccagctactcaggaggctgaggtgggaggatcacttggacttgggaggcggttgttgcagtgagctgtgatcatgccatcacaccgctgccttgtgagagattgagacactctaaataaataataaccaagatgggaaatttccctgccagaccttgtttactagaaatcaggtggccaaaacatgactctcagagtggggcttcatgaccatgtgcatcagaattgcctggagtgtgcactgaaactgtgtattaccaagctcactctagccaactaaataaaaatctctggcagtaaaatccaggagtctgcagtttctaaaatcacacaggtgagtgggcatggtggctcatgcctgtaatcccagcactctggaaggctgaggtgggtggatcacctgaagtcagaagtttgagaccagcctggcaaacatggcaaaactgtctctattaaaaatacaggccaggggctgggcacggtacctcacacctgtaatcccagcacttaggtaggccaaggtgggtggatcacgaggtcaggagattgagaccatcctggctaatatggtgaaaccctgtctctactaaaaatacaaaaaaattagctaggcatggtggcgggctcctgtagtcccagctactcaggaggctagagcaggagaatggcgcgaacatgggaggcgtagcttgcagtgagctgagatcacaccactgcactccagcctgggcaacagagcaagactgtctcaaaaaaaaaaaaaaa

SEQ ID NO: 87 - DNA, 2701 bp, Homo sapiens
gagcctgcgcaggaggccaataggctgccaatactccttggactccccgccagggccctgctgtcagtgcgcctgcgcgcgggtccggcgccgaggttcttgactgctgtgccggacgccaggtgtagccatgcagcgagccgattccgagcagccctccaagcgtccccgttgcgatgacagcccgagaaccccctcaaacaccccttccgcagaggcagactggtccccgggcctggaactccatcccgactacaagacatggggtccggagcaggtgtgctccttcctcaggcgcggtggctttgaagagccggtgctgctgaagaacatccgagaaaatgaaatcacaggcgcattactgccttgtcttgatgagtctcgttttgaaaatcttggagtaagttccttgggggagaggaagaagctgcttagttatatccagcgattggttcaaatccacgttgatacaatgaaggtaattaatgatcctatccatggccacattgagctccaccctctcctcgtccgaatcattgatacacctcaatttcaacgtcttcgatacatcaaacagctgggaggtggttactatgtttttccaggagcttcacacaatcgatttgagcatagtctaggggtggggtatctagcaggatgtctagttcacgcactgggtgaaaaacaaccagagctgcagataagtgaacgagatgttctctgtgttcagattgctggactttgtcatgatctcggtcatgggccattttctcacatgtttgatggacgatttattccacttgctcgcccggaggtgaaatggacgcatgaacaaggctcagttatgatgtttgagcaccttattaattctaatggaattaagcctgtcatggaacaatatggtctcatccctgaagaagatatttgctttataaaggaacaaattgtaggaccacttgaatcacctgtcgaagattcattgtggccatataaagggcgtcctgaaaacaaaagcttcctttatgagatagtatctaataaaagaaatggcattgatgtggacaaatgggattattttgccagggactgccatcatcttggaatccaaaataattttgattacaagcgctttattaagtttgcccgtgtctgtgaagtagacaatgagttgcgtatttgtgctagagataaggaagttggaaatctgtatgacatgttccacactcgcaactctttacaccgtagagcttatcaacacaaagttggcaacattattgatacaatgattacagatgctttcctcaaagcagatgactacatagagattacaggtgctggaggaaaaaagtatcgcatttctacagcaattgacgacatggaagcctatactaagctgacagataacatttttctggagattttatactctactgatcccaaattgaaagacgcacgagagattttaaaacaaattgaataccgtaatctattcaagtatgtgggtgagacgcagccaacaggacaaataaagattaaaagggaggactatgaatctcttccaaaagaggttgccagtgctaaacccaaagtattgctagacgtgaaactgaaggctgaagattttatagtggatgttatcaacatggattatggaatgcaagaaaagaatccaattgatcatgttagcttctattgtaagactgcccccaacagagcaatcaggattactaaaaaccaggtttcacaacttctgccagagaaatttgcagagcagctgattcgagtatattgtaagaaggtggacagaaagagtttgtatgccgcaagacaatattttgttcagtggtgtgcagacagaaatttcaccaagccgcaggatggcgatgttatagccccactcataacacctcaaaaaaaggaatggaacgacagtacttcagtccaaaatccaactcgcctccgagaagcatccaaaagcagagtccagctttttaaagatgacccaatgtgaatgtctgtagtcagttgtttacaaactccctctcctgcacaattcatttagaggcttcaatcatagaattctgcaaattaatgacaactcatgctttaattttgtattttgaatgtacacgcatgctgaagctaagtaacttttaatcaaagaaataagatggtattaggcaaatcttactatactatgaaaagcattaccttgcctatttttaatattattaaagcctttctccttcagtagtctattttcttagaataacaactcttttatctattctgaactctattttttttcttttttaagagacaaggttttgctctgttgcccagcttggactcgaactttcctgggctcaagcgaccctcctgcctcagccccccaagtagctgggactaaagtcatgtgccaccacacccagcttactctgaacttttatgacagatgattgttttttgtttttaatgtagaaatgagacaagggtacaaattggaactagaaattgacattgtcattgacaaacatggctaaaaacaaaacatcaaatcctgcccccgtgaagagttccctgtcacctcaagtttgaggatagtcctctaagagtgacctaagcataagtgaaagacacctcccctcacccttctagccccctacaaggtgccaggttggggtaaagagttggagatgat

SEQ ID NO: 88 - DNA, 12265 bp, Homo sapiens
cactgagcggctgcggcgcggcttccatcctcccgccctcctgacgcggccggagcgcagccctgaggcccagggagaacgacacattggatacagaagggaggtgatcatgcaccatggcactggcccccagaacgtccagcatcagctgcagaggtccagggcctgccctggcagcgagggtgaggagcagccggcccaccccaacccacccccgtcccccgcagctcccttcgctccctcagcaagcccgtcggcaccccagtctcccagttatcaaatacagcagctgatgaataggagccctgcaaccgggcagaacgtgaacatcaccctgcagagcgtgggccctgtcgtcgggggaaaccagcagatcacactggccccactgccgctccccagccccacctctccaggcttccagttcagcgctcagcctcggcggtttgagcatgggtctccatcatacattcaggtcacgtcccccttgtcccagcaggtccagacccagagtcccacgcagcccagtccggggccggggcaggccttgcagaatgtgcgtgcaggtgcccctggccctgggctgggcctctgcagcagcagccctacagggggcttcgtggatgccagcgtgctggtgaggcagatcagcttgagcccctccagtggtggacactttgtgtttcaggatgggtcagggctcacccagatcgcccagggagcccaggttcagctccagcacccgggtacgcccatcacagtccgagagcggagaccctcccagccccacacacagtcagggggcaccatccaccacctgggaccccagagccctgcagccgcgggtggggccggcctgcagcccctggccagcccaagccacatcaccacggctaacttgccaccgcagatcagcagcatcatccagggccagctggttcagcagcagcaggtgctgcaggggccgccgctgccccggcccctgggcttcgagaggacacccggcgtgctgctccccggggctgggggcgcagcggggtttgggatgacgtccccacccccgcccaccagcccttccaggactgccgtgcccccaggcctttccagcctcccactcacgtctgtggggaacacgggaatgaagaaggttcccaagaagttagaggagattcccccagcctctccggagatggcacagatgaggaagcagtgcctggactatcattaccaggagatgcaggctctgaaggaggtcttcaaggagtatttgattgaactgtttttcttgcaacactttcaagggaacatgatggatttcttagctttcaagaagaaacattatgccccattacaagcatatcttaggcagaatgatttggacattgaagaagaggaggaggaggaggaagaggaggaagaaaaatctgaggttatcaatgacgagcaagccctcgcagggagcctggtagcaggggccggaagcacagtagagacggacctgtttaagaggcagcaggcgatgccctccacaggtatggcagagcagtctaagaggcctcgccttgaagtgggtcaccaaggggtagttttccagcacccaggggcggacgcaggcgttcctctccagcaactaatgccgaccgcacaaggaggaatgccccccacgccgcaggccgcgcagctcgctggacagaggcagagtcagcagcagtatgacccctccacggggcctcccgtgcagaacgctgccagcttgcacaccccactgccgcagctgcccgggaggctgcccccagccggtgttcccactgcagccctctcctctgcgctgcagtttgcacagcagccgcaagtggtagaggcccagacacagctccaaatcccggtgaagactcagcagcccaatgttcccatccctgcaccgcccagcagccaactccccatccctccctcgcagcctgcacagctggccctccacgttcccacacctggaaaggtgcaggtgcaggcctctcagctttcctccctgccacagatggtagcatcgacaaggctccctgtggaccctgccccgccctgcccacggcctctgcccacctcttctacctcgtccctcgcgcctgtgagtggctccggcccaggaccctcccctgctcgatcctctccagtaaatagaccttcctcagccaccaataaggcactatctccagtcacttcccggaccccaggggtggtggcatctgcccccaccaaaccacagagtcctgctcagaatgccacctcgtcccaagacagttctcaggatacgctgacagaacaaataactctggagaaccaggtgcatcagcgcattgcggagctgaggaaagcaggtctgtggtcccagaggcgtctgccaaagctgcaggaggccccacgccccaagtcccactgggactatctgctggaggagatgcagtggatggccacagactttgcccaggagaggaggtggaaggtggctgctgcgaagaagctcgttagaactgtggtgcgccatcacgaggagaagcagctccgtgaagaaagggggaagaaggaagagcagagcagactgaggcggatagccgcctccacggcccgggagatagagtgcttttggtcgaatattgaacaggttgtggaaataaaactacgagtagaattagaagaaaaaaggaagaaggccttaaatttacagaaagtttccaggagagggaaagaattgagacctaaaggatttgacgcattacaggaaagttctctggattcaggaatgtctggaagaaaaagaaaagctagcatatctttgactgatgacgaagtggacgatgaagaggaaacaattgaagaggaggaagcaaatgaaggcgttgtggaccaccaaacagaactttctaatttagccaaggaagctgagctgcccctcctggacctgatgaagctgtacgaaggcgccttcctgccgagttctcagtggccccggccgaagcctgatggggaggacacaagcggagaggaagatgcagatgactgtccaggcgacagggagagtcgcaaggacttggttctcatcgactcgcttttcatcatggatcagttcaaagctgccgagaggatgaatatcgggaagccaaacgccaaggacattgcggacgtcactgcggtggctgaagccatcctgccgaagggcagtgctcgggtcacaacctcggtcaagtttaatgctccatctttgttgtatggggctctcagagattatcagaagattggcctggactggctggccaaactttacaggaagaatctcaatggcatattggcagatgaagctgggctgggtaaaacagtgcagatcattgctttttttgcccacctagcttgtaacgaaggtaattggggcccccatcttgttgttgtgagaagttgtaacatactcaagtgggagcttgaattgaaacgttggtgtcccggactcaaaatcctctcatatattggcagccacagagaactcaaagcaaagagacaggagtgggccgaacccaacagcttccacgtctgcatcacgtcctacactcagttcttccggggcctcaccgccttcacacgagtgcgctggaagtgcctggtcattgatgagatgcagcgcgtgaagggcatgaccgagaggcactgggaagcggttttcaccctgcagagccaacaacgtctgcttctgatcgactcgccgctgcacaataccttcctggagctctggaccatggtgcacttcctggtcccagggatctccaggccctacctgagctcccctctgagggcccccagtgaagagagccaggattactaccataaagtggtcataaggttacacagggtgacacagccatttattttgaggagaactaagagagatgtggaaaagcaactaacaaagaaatatgagcatgttttgaagtgtcgcctttctaaccgacaaaaagccttatacgaggacgttatcctgcaacctggcactcaggaggccttgaagagcgggcactttgtcaacgtcctgagcatccttgtgcggctgcagcgcatctgcaaccaccctgggctcgtcgagccccggcacccaggctcttcctacgtggcggggccactggagtatccgtccgcatctctaatcctgaaggcactggagagagatttctggaaggaagcagatctttctatgtttgatctcatcggcttagaaaataaaatcactcgtcacgaggcagagttgctgtctaagaaaaagataccgcggaaactcatggaggaaatctccacttcagcagccccagcagcccgaccagcagcagcaaagctgaaggccagcaggttgtttcagcctgtgcagtatggccagaagcccgagggtcgcaccgtggctttccccagcactcacccgccccggacggcagcccccaccacggcctctgctgctccacagggcccgcttcgaggacggccgcccatcgccacgttctctgccaatccggaggcaaaagcagcagcagccccgtttcagacctctcaggcttccgccagtgctccacgacaccagcccgcctcggcctccagcacagccgctagcccggcccatcctgcgaaactgcgggcccagaccacagcacaggcctccaccccaggccagcccccgccccagccccaggccccctcgcacgcggccgggcagagcgcgctgcctcagaggctggtgctcccctcgcaggcccaggcccgcttgcccagtggagaggtagtgaaaatagctcagctggcatccatcacaggaccacagagccgcgtggctcagccagagacgccggtgacactgcagttccagggcagcaagttcaccctgtcacacagccagctccggcagctcacagcgggccagccgctgcagctgcaaggcagcgtcctccagatcgtgtccgcccccgggcagccctaccttcgagcccctggccctgtggtgatgcagaccgtgtctcaggcgggcgctgtgcacggcgccctgggaagcaagcccccggccggcggtcccagccctgcacccttgaccccacaagttggcgttccgggccgcgtggcggtgaatgccttggctgtaggagaacccggaacggcctccaaaccagcttctcccattggagggccgacccaggaggaaaagaccagactcttgaaagagcgcctggatcagatttatttagtcaacgagcggcgctgttctcaagctccagtctatggcagagacttgctaaggatttgtgccctgcctagccatggaagggtacagtggcgtgggtccctggatggccgtcgtgggaaggaggccgggccagcgcacagttacacttcatcctcagaaagtccaagtgagctgatgttgacgctttgtcggtgtggagagtctctgcaggatgttattgacagggtggcctttgtgattcctccggtggtggcagcacccccgtccctacgggtgccgcggccgccacccctgtacagccacagaatgaggatcttgaggcagggcctgagagagcacgctgcgccgtacttccagcagctgcggcagaccacggctccacgcctgctgcagttccctgagctgaggctggtgcagttcgactcagggaagttggaagctttagctatcttgcttcagaaattgaaatctgaaggacgtcgggtgctgattttatcacagatgattcttatgttggacattttagagatgttcttgaacttccattacctcacctatgtaagaatcgatgaaaatgccagcagtgagcaacggcaggaactgatgaggagtttcaacagagacaggcggattttttgtgccattctctccactcacagccgtaccacaggtataaaccttgtagaggcggacaccgtcgtgttttatgacaatgacctgaatccagtgatggatgccaaagctcaggagtggtgcgataggatcgggagatgcaaagacatccacatatacaggcttgtgagtggcaattccattgaagagaaattgttgaaaaatggaactaaagatctgatccgagaagtggctgctcagggaaatgactactccatggctttcttaactcagcgaaccatccaggagctgtttgaagtttattctcccatggatgatgctggcttcccggtcaaagctgaggagtttgtggtgctttctcaggaaccttctgtcacggaaaccattgcacccaaaattgcaagacctttcatagaggccctcaagagtattgagtatctggaggaggatgcccagaagtccgcacaggagggggtgctgggaccacacactgatgctctgtcatcagactctgagaacatgccgtgtgatgaagaaccatcccaattagaggagctagctgacttcatggagcagcttacaccaattgaaaaatatgctttaaattacctggaattattccatacttctattgagcaagaaaaggagagaaacagtgaggacgcagtgatgactgcagtgagggcatgggagttctggaacctgaagaccctgcaggagagggaggcccggctgcggctggagcaggaggaggcggagctcctgacctacacgcgagaggatgcctacagcatggagtatgtctacgaagatgtcgatgggcagacagaagtcatgccgctctggaccccacccaccccgccgcaggacgacagcgacatctacctcgactcggtcatgtgtctcatgtatgaagccactcccatcccagaggctaagctgccccctgtgtacgtgaggaaggagcggaagcgacacaaaacagacccctcagctgcaggcaggaagaagaagcagcgtcacggggaggcggtcgtccctcctcggtccctgtttgaccgcgcaacaccaggacttctgaaaattcgcagagagggcaaggagcagaagaagaatattctgctgaagcagcaggtgccattcgccaagcccctgccaacttttgccaaacccacagctgagcctggtcaagacaaccccgagtggctcatcagtgaggactgggcgctgctgcaggctgtaaagcagttactggagctgcctttgaacctcacaatcgtgtcacctgctcacacacctaattgggatcttgtcagtgacgttgttaactcctgtagccgaatctaccgctcttccaaacagtgccggaatcgctacgagaatgtcatcattccacgagaggaggggaagagtaaaaacaaccgtcctctccgtacgagccagatctatgcccaggatgagaatgccacacacacccagctgtacacgagccactttgacttaatgaaaatgactgctggcaagaggagtcccccaatcaaacctctgcttggcatgaatccctttcagaagaaccccaagcacgcgtctgtgttggcagaaagtggaatcaactatgacaagccgctgcctcccatccaggtggcatctctccgtgcagagcgaatcgcaaaagagaaaaaggctctggctgatcagcagaaggcacagcagccggccgtggcccagccacccccgccccagccgcagcccccaccacccccgcagcagccaccgccaccgctgccacaaccacaggcagcgggcagccagccgccagcagggccaccagctgtccagccccaaccccagccacagccccagacccagccacagcctgtgcaggccccagcgaaggcgcagcccgcaatcacgacggggggcagtgcagccgtactggcaggaaccattaaaacatcagttactgggacgagcatgcccactggtgccgtgagtggaaatgtgatcgtgaacaccatcgcaggggtcccagctgccaccttccagtccatcaacaagcgcctggcgtcgccagtggctcctggggccttgactacgccgggaggctctgctcccgcccaggtggtgcacacccagcccccgccacgggcagtcggctccccagccacggcgacccctgacctggtgtccatggcaacgactcagggtgttcgagcggtcacttctgtgacagcctcggccgtggtcactaccaacctgaccccagtgcagaccccggcacggtctttggtgccccaagtgtcccaagccacaggagttcagctccctggaaaaaccatcacacctgcacatttccagcttctcaggcagcagcagcagcagcagcaacaacagcagcagcagcagcagcagcagcagcagcagcagcagcagcaacagcagcagcagcaacagacgacgacgacctctcaggtgcaagttccacagatccagggccaggcccagtccccagcacagatcaaagctgtgggcaagctgacgccggaacacctcatcaaaatgcagaagcagaaactgcagatgcccccgcagcccccaccgccacaggcccagtctgcgcccccgcagccaacagcccaagtgcaagtgcagacctcgcagccgccgcagcagcagagcccccagctcacgacggtcacggccccaaggcctggtgccctgctgacgggcaccaccgtggccaacctccaggtggcccggctcacccgggttcccacttctcagctgcaggcgcaagggcagatgcagacccaggcaccccagccagcccaggtggccttggcgaagcctccggtggtgtccgtcccggcagctgtggtctcctcaccgggagtcaccaccctgcccatgaacgtcgcggggatcagcgtggcgatcggtcagccacagaaggcagcaggacagaccgtggtggcccagcccgtgcacatgcagcagctgctgaagctgaagcagcaggccgtccagcagcagaaggccatccagccccaggctgcacagggcccggcagccgtccagcagaagatcaccgcacagcagatcaccacccctggcgcgcagcagaaggttgcctacgccgcgcagccggcccttaagacccagtttcttaccacacccatctcccaggcccagaaactggccggggcccagcaagtgcagacccagatccaggttgcaaaacttcctcaagttgttcaacagcaaacacccgtggccagcatccagcaagttgcctctgcttcccagcaggcttctccacagactgtggcgctcacgcaggcgacggcggccgggcagcaggtgcagatgatccctgcagtgaccgcgactgcccaggtggttcagcagaaactcattcagcagcaggtggtgaccacggcgtcggccccgctccagactccaggcgctcccaacccagcccaggtgcccgccagctccgacagcccaagccagcagcccaagttacagatgagggtccctgctgtcaggctaaagacacctactaagcctccgtgccagtagtcagggcagcagggctgcctctcatctaaagcaaaactaccttcctcacagaaaacgctttattagtgaaccttgggaccatgtcacgcaagagattcagcactgggaaagatataattgaaacaaaatagtgtaatcattttattaaaatgcatcccacactgcaggacaaatggtccttatggagtgccgcgttctctgtactacgtggctcatggaaaaagtgacaacatggcttcctctaaatcatttcacctttcagtccccacccgcacccgtcccctagagccatagtactgtgttctgaaagccatttagaatttctttgtgagcatgtagtgctttgcacgccacagaagccgtctgccgtgtgtgaggagcatacaatggactttctaaagataaggcgtgggcttccacagtgtctgccagagtttagttctttataccttactgaaaaatgcctcgtggtcttcgcagaggggaaggcctgtctaaagtcaatcatccgagatgggttttccattccaaagaaaggcaatatggttccttccttccctcctaaaatatgacttaacttttaagagaaatgttctgacacccacctaaacacacaaggcacgttcctggcctgtgttcaagggaaatgatcagtcattgcattgttattccaaagagcagccaacagtggcctcccccaggccctaccctgcaatgggattcgctttcatttaatggaaacttctgggactgatgcccaactcagtgcactcaagacgcatctccagttttcgggggaagctggtatttgacatagtgtgttaaacagctcctgagaacctttgggacactctgccatggctggcgtgaggcccagaggaccacgcagaggcaatggtagtacagatgtcacagctgagggtacgatgaggcctgggctcagtgagccaggacgaatgtgacagacaccccttgctgccacagtcagccctttgacgaaggtgggctggtgattctggaagtattggctatagcggtgggcccagtcaactcttccttgtggacttacgacagcagattttctctaggataagcttgtgtggttctgccagtgaagcagagaaccacctgtgctgttgtggaaggcgtgccgttgagggggaaaacgaagcccagtatttgctactgtttttcctttttttactatgacaggaaaataaatgcaattttagtggaattgattgacagtgtctccttactttgaagttttcaccaaagcaaaaaggtccatatccaatagtatcctttgtgctgtggcttgattttggcctattttacattatttggtccaggaaattaggttatattaggttttttgtatactaaaaatcagttatggcacaataaagattttctgtttttaaattgtatttcatctgcttcctccccattctctcactttaagtgacattgaggaaggtattctgtcccacaggtttctgtggacagcgatacagcaggagtcagtgaaatcaactggggagctcacttgagctcttgataagaaatgtggagaaaagtaaaaaccaagctttgaagaaacagaagaaattaatcttttagttagttgaacataccaaagcagaggactggaatctgtttgttctaaccaacccgttctccctggcttggcacgtgccgtgagagcgcagcttgccggagggagggccgctgtgtgcgcctcacatctggctcccagtggaaacttttactcctcctcatccgcagatgtgatagaactgaagtatctaggaattctgcctttgtcatttgttttaatttgtgtgccctgttcattttttttgtctttcccaaatcttggtagtctccttatagttgaagataaaatgttgagtgcacttattttagaatatcctagacataactgtctaagtaaaagcgctctattaatctaaaacactacaagagaatttaacaccatctctcaaatgcttttttggagagcttaatgggattctgaatatttgcaatgtggagtttccgccccgatctcacgtcagtgagggtctcctgtctctcaagtgtgtttcctttggctgttccctaatacaaaacacggacatatttttactcgtagcactcaatttagtaacttctagatgctaccgttgacctgagttaaattcatttagtcgtgtacgtaaaaactctccttttagtgtgttattttcttggccttcccttttaaaggttaaagtttctaacctaagaattaagtacgcgttcaggaagctgttgtctaggccttccccttgtgaatctgggttcattccaatacggcaagtaagagttggaaactttgagaacacagactataaaggcagcagcccgaacactgtcagactctaattggcgaccctgggaaacagttgccctgctattctttaaagaaagacgtttattctgatgataaaaacagttagccagactgtttttaaagcacctggcgggaagcagaaggttggatccaagcccttgttcagatttggtgcctgataagacaggggtttctctttttgtgacctttattattattattttgttaactgttgtaaccagttagctgttgtgttttaagatagaaaggaacaagactaaaattgtaaatactttgtaaacatcagcatttgtacttgaatagtaggattttaaagggcattgatagcataccaaacaaaaggcaaaataaagtgacctttttatata

SEQ ID NO: 89 - DNA, 4205 bp, Homo sapiens
ctccctcgctccctccctgcgcgccgcctctcactcacagcctcccttccttctttctccctccgcctcccgagcaccagcgcgctctgagctgcccccagggtccctcccccgccgccagcagcccatttggagggaggaagtaagggaagaggagaggaaggggagccggaccgactacccagacagagccggtgaatgggtttgtggtgacccccgccccccaccccaccctcccttcccacccgacccccaacccccatccccagttcgagccgccgcccgaaaggccgggccgtcgtcttaggaggagtcgccgccgccgccacctccgccatggagctgatcaccattctcgagaagaccgtgtctcccgatcggctggagctggaagcggcgcagaagttcctggagcgtgcggccgtggagaacctgcccactttccttgtggaactgtccagagtgctggcaaatccaggaaacagtcaggttgccagagttgcagctggtctacaaatcaagaactctttgacatctaaagatccagatatcaaggcacaatatcagcagaggtggcttgctattgatgctaatgctcgacgagaagtcaagaactatgttttgcagacattgggtacagaaacttaccggcctagttctgcctcacagtgtgtggctggtattgcttgtgcagagatcccagtaaaccagtggccagaactcattcctcagctggtggccaatgtcacaaaccccaacagcacagagcacatgaaggagtcgacattggaagccatcggttatatttgccaagatatagacccagagcagctacaagataaatccaatgagattctgactgccataatccaggggatgaggaaagaagagcctagtaataatgtgaagctagctgctacgaatgcactcctgaactcattggagttcaccaaagcaaactttgataaagagtctgaaaggcactttattatgcaggtggtctgtgaagccacacagtgtccagatacgagggtacgagtggctgctttacagaatctggtgaagataatgtccttatattatcagtacatggagacatatatgggtcctgctctttttgcaatcacaatcgaagcaatgaaaagtgacattgatgaggtggctttacaagggatagaattctggtccaatgtctgtgatgaggaaatggatttggccattgaagcttcagaggcagcagaacaaggacggccccctgagcacaccagcaagttttatgcgaagggagcactacagtatctggttccaatcctcacacagacactaactaaacaggacgaaaatgatgatgacgatgactggaacccctgcaaagcagcaggggtgtgcctcatgcttctggccacctgctgtgaagatgacattgtcccacatgtcctccccttcattaaagaacacatcaagaacccagattggcggtaccgggatgcagcagtgatggcttttggttgtatcttggaaggaccagagcccagtcagctcaaaccactagttatacaggctatgcccaccctaatagaattaatgaaagaccccagtgtagttgttcgagatacagctgcatggactgtaggcagaatttgtgagctgcttcctgaagctgccatcaatgatgtctacttggctcccctgctacagtgtctgattgagggtctcagtgctgaacccagagtggcttcaaatgtgtgctgggctttctccagtctggctgaagctgcttatgaagctgcagacgttgctgatgatcaggaagaaccagctacttactgcttatcttcttcatttgaactcatagttcagaagctcctagagactacagacagacctgatggacaccagaacaacctgaggagttctgcatatgaatctctgatggaaattgtgaaaaacagtgccaaggattgttatcctgctgtccagaaaacgactttggtcatcatggaacgactgcaacaggttcttcagatggagtcacatatccagagcacatccgatagaatccagttcaatgaccttcagtctttactctgtgcaactcttcagaatgttcttcggaaagtgcaacatcaagatgctttgcagatctctgatgtggttatggcctccctgttaaggatgttccaaagcacagctgggtctgggggagtacaagaggatgccctgatggcagttagcacactggtggaagtgttgggtggtgaattcctcaagtacatggaggcctttaaacccttcctgggcattggattaaaaaattatgctgaataccaggtttgtttggcagctgtgggcttagtgggagacttgtgccgtgccctgcaatccaacatcatacctttctgtgacgaggtgatgcagctgcttctggaaaatttggggaatgagaacgtccacaggtctgtgaagccgcagattctgtcagtgtttggtgatattgcccttgctattggaggagagtttaaaaaatacttagaggttgtattgaatactcttcagcaggcctcccaagcccaggtggacaagtcagactatgacatggtggattatctgaatgagctaagggaaagctgcttggaagcctatactggaatcgtccagggattaaagggggatcaggagaacgtacacccggatgtgatgctggtacaacccagagtagaatttattctgtctttcattgaccacattgctggagatgaggatcacacagatggagtagtagcttgtgctgctggactaataggggacttatgtacagcatttgggaaggatgtactgaaattagtagaagctaggccaatgatccatgaattgttaactgaagggcggagatcgaagactaacaaagcaaaaacccttgctacatgggcaacaaaagaactgaggaaactgaagaaccaagcttgatctgttaccattgggatgataacctgaggacccccactggaaatctcccatcttttgaaaaacctggaagtgaggagtgtgcacggatgctgaatgtttgggaatgagaggatgagtgagtgaggcttgaaaacacaccacattgaaaatcctgccacagcagcagccgcagccgccaacagcagcgctgttagtgagctaagtaagcactgacttcgtagaaaaccataacatcggccatcttggaaaagagaaaaacaatggagttacttatttaaaaaaaaagaaagaaagttatctcttcccaggagaggctagaagtagcttttctgtcttttggccagtgccgagtggaatgcctggtttgggggaggaggagggactgggttcagctgtggtgctttgttgtaaaaggcagcctggcctttgctactgaggagaaagatggagcctgggtctcaagcccaccttcgctgtacctttgccacatggtactgtatgcttgccagctagaaggagggtcagggattttttacagtctgagaatgagtgtgtgtgagtgaggcggtatccacattctcaacttcaagtcattgcagtttctttttcccagaaaacaaggggttagatgttgcatttcataaaactaaccgaagttctgtctactgatgcagcacaagagatgtaaaaaaaaaaaaaaaaaaaaaaaaaaaaacacacacacagaggaaagacgctctttaggttttgttttgttttttttttttggttttgttttttgttttttttactctagggaaaacactgacgaatggtcagagctcctatcctgatcttttcatcaaggcgcctttcctaataatatggttcaactgtgaatgtagaagtgggggggaggggggagaaaaagaaaactctggcgttagaggatatagaaaaatataagtacaattgttacaaataacgcagacttcaaaaacaaaaaaatcacaacccaaacaaaccaaaatttaaatgatcagaattggcagcacaaagaaaacgccctctcctgacttgtattgtggcagtctgaacgcccccagaaaattgtgccaaagagtttagaaaaataaatatacaataaaagtaaacacatacacacaaaacagcaaacttcaggtaactattttggattgcaaacaggataaattaaatgttcaaacaatctgataaaataaccatttggaaactgaaaa

SEQ ID NO: 90 - DNA, 1039 bp, Homo sapiens
gttgcaggcagacggagcagagcggtcagggatcatgagggagagtgcgttggagcgggggcctgtgcccgaggcgccggcggggggtcccgtgcacgccgtgacggtggtgaccctgctggagaagctggcctccatgctggagactctgcgggagcggcagggaggcctggctcgaaggcagggaggcctggcagggtccgtgcgccgcatccagagcggcctgggcgctctgagtcgcagccacgacaccaccagcaacaccttggcgcagctgctggccaaggcggagcgcgtgagctcgcacgccaacgccgcccaagagcgcgcggtgcgccgcgcagcccaggtgcagcggctggaggccaaccacgggctgctggtggcgcgcgggaagctccacgttctgctcttcaaggaggagggtgaagtcccagccagcgctttccagaaggcaccagagcccttgggcccggcggaccagtccgagctgggcccagagcagctggaggccgaagttggagagagctcggacgaggagccggtggagtccagggcccagcggctgcggcgcaccggattgcagaaggtacagagcctccgaagggccctttcgggccggaaaggccctgcagcgccaccgcccaccccggtcaagccgcctcgccttgggcctggccggagcgctgaagcccagccggaagcccagcctgcgctggagcccacgctggagccagagcctccgcaggacaccgaggaagatcccgggagacctggggctgccgaagaagctctgctccaaatggagagtgtagcctgagggctggtgttgcctgcctcccctgtgcttgtgccttgtcccaaaataaatcctttcagaatgtagcactcacgccctaataaggagcgaatcctacatccaccaaggcgggcgctctggccctcccttccttaagcccagtcctgtgtcctctgaaagaggtgcagtcactcacacctgcttgcgctcaccatcaataaaagtaatttcacccgaaaa

SEQ ID NO: 91 - DNA, 2041 bp, Homo sapiens
acaggagaatgagaggcctccgctggcgttacactcggctgcccagccaggtggaggacaccctgtctggggaggagggtaacgaagaggaagaggaggaggaggcagctccagacccagctgctgctcctgaggatcccacggtgccccagctgacagaagccagccaggttttgagtgcctcagagattcggcagctcagctttcacttcccaccaagagtcaccggccatccctggagtctggtcttctgcacgtcaagggacggtttcagcctgcagagcctgtaccggcggatggagggctgcagcgggccagtgctgctggtgctcagggaccaggacgggcagatatttggagccttctcctcctcggctatccgactcagcaaaggcttctatggtactggcgagacattcctcttctccttctccccacagctgaaggtctttaagtggactggaagcaactctttctttgtgaagggagacttggattcactgatgatgggcagtggcagtggccggtttgggctgtggttggatggagacttgttccgcgggggaagctccccttgcccgaccttcaacaacgaggtgctggcccggcaggagcagttctgcatccaggagctggaggcttggcttctcagctgacagccctgcggcaacagaattctatgattgaagcctctaaatgaattgtgcaggagagggagtttgtaaacaactgactacagacattcacattgggtcatctttaaaaagctggactctgcttttggatgcttctcggaggcgagttggattttggactgaagtactgtcgttccattcctttttttgaggtgttatgagtggggctataacatcgccatcctattaagaagagagagaaaaacaggcaatagagaaaagccagtttccatcatcttatttctgagtgaaagtctcaagtgcgcacatcctcatcttgcatatagattgcttctagctgtcctcaatccagggaaactccaaattacatatgccctgtgcttggggcaaattagaaacactacagtcttacgcaggaagagccttcatgaaaacagccactggcctctgcagagatgactgggagcagcataccactgcccacctctatggcctccttcacacaccttcacggagcacaaactctgtcctgttttcccaggagaaagacgggatgcactgaacccctagcttctctctcgcctggtcccctctgcaataaaaggcccaggtctacaagatggcaaagaaggggaggaagaacagtatgtacctgcagaatttaaatttttctctgcatcaaagctctaacgttggtcccatcagcataggctccagccaaagaagctcctccacccaaaataagggagagatccaaagggaggcgatacaatgacgtgaaaccatagaggtaagaagcaaggcctcctaatacttgactctatgctaaactgttctgaacttgtgggtagatcttctttggttacaagatgatgcacgatcttggagagcctctgttgtaccaggaatacaatgctggtgggaggattcgtgctcctcatctgcttatttgctctcagatccattcttcactcttcctctccctactctgtctcacaggagctactccggtaaattacatttctcagctcccatgcctgttggtttccagttagatttggtcagtgggaggctctggtgggagactggaggtgagaagagggcagagaagtcaggttttttctctccctacctcctctggcacgagcggcagtggcagtgactattctgtggttctagcttttgcaggtggccccagctcctggactcccacctgctcccttggtctctcctatcctagaggtggtagcagcttcctgctgttgaatcactgtcctctatgctcatttagctctgccaaaacttttgtatctcacccccatgttaaattttttctgttgaactacactggatctgacttgatagaactattaaaaatagttttt

SEQ ID NO: 92 - DNA, 1814 bp, Homo sapiens
cggggaatgttttcctagagatgtcagcctacaaaggacacaatctctcttcttcaaattcttccccaaaatgtcctttcccaacagctctcctgctgctaatacttttttagtagattccttgatcagtgcctgcaggagtgacagtttttattccagcagcgccagcatgtacatgccaccacctagcgcagacatggggacctatggaatgcaaacctgtggactgctcccgtctctggccaaaagagaagtgaaccaccaaaatatgggtatgaatgtgcatccttatatacctcaagtagacagttggacagatccgaacagatcttgtcgaatagagcaacctgttacacagcaagtccccacttgctccttcaccaccaacattaaggaagaatccaattgctgcatgtattctgataagcgcaacaaactcatttcggccgaggtcccttcgtaccagaggctggtccctgagtcttgtcccgttgagaaccctgaggttcccgtccctggatattttagactgagtcagacctacgccaccgggaaaacccaagagtacaataatagccccgaaggcagctccactgtcatgctccagctcaaccctcgtggcgcggccaagccgcagctctccgctgcccagctgcagatggaaaagaagatgaacgagcccgtgagcggccaggagcccaccaaagtctcccaggtggagagccccgaggccaaaggcggccttcccgaagagaggagctgcctggctgaggtctccgtgtccagtcccgaagtgcaggagaaggaaagcaaagaggaaatcaagtctgatacaccaaccagcaattggctcactgcaaagagtggcagaaagaagaggtgcccttacactaagcaccaaacgctggaattagaaaaagagttcttgttcaatatgtacctcacccgcgagcgccgcctagagatcagtaagagcgttaacctcaccgacaggcaggtcaagatttggtttcaaaaccgccgaatgaaactcaagaagatgagccgagagaaccggatccgagaactgaccgccaacctcacgttttcttaggtctgaggccggtctgaggccggtcagaggccaggattggagagggggcaccgcgttccagggcccagtgctggaggactgggaaagcggaaacaaaaccttcaccgctctttgtttgttgttttgttgtattttgttttcctgctagaatgtgactttggggtcattatgttcgtgctgcaagtgatctgtaatccctatgagtatatatatatatatatatatatatatataaaaacttagcacgtgtaatttattattttttcatcgtaatgcagggtaactattattgcgcattttcatttgggtcttaacttattggaactgtagagcatccatccatccatccatccagcaatgtgactttttcatgtctttcctaacacaaaaggtctatgtgtgtggttagtccatgaactcatggcattttgaatacatccagtactttaaaaatgacatatatatttaaaaaaaaaagattaagaaaacccacaagttggagggagggggacttaaaaagcacattacaatgtatcttttcacaaatgaatttagcagttgtccttggtgagatgggatattggcgatttatgccttgtagcctttcccttgtggtgcatctgtggtttggtagaagtacaacagcaacctgtcctttctgtgcatgttctggtcgcatgtataatgcaataaactctggaaatgagttcaaaaaaaaaaa

SEQ ID NO: 93 - DNA, 5246 bp, Homo sapiens
ggcgcttttcccggccggctctggtgctcggtgtccctccgccgccgctcccgtttccggcgggggagatggccaggatctgacccgggaggaggccgcacccgcgccgcgctctgcggctggctctaggcgatgccgagcagctcggacacggcgctggggggaggcgggggcctgagctgggcggagaagaggttggaggaacgccgcaagcggaggcgattcctgtcccctcagcagccgccgctgctgttgccgctcctgcagccgcagctcctgcaaccgccgccgcccccgccgcctctgctcttcctggctgctcccggcacggccgccgccgcagccgccgccgccgcggcctcctcctcttgcttcagcccgggcccccctctggaggtcaagcggctggcgagaggcaagaggcgcgcaggagggcggcagaagcggcgtcgcgggccccgcgccgggcaggaggcggagaagcgtcgggtcttctcgctgccccagccgcagcaggacggcggtggcggtgctagtagcggcgggggtgtgaccccgctggtggaatacgaggatgtgagctcccagtccgagcaggggctgctgctggggggggccagcgcggcaacggcggcgacggctgccgggggaacggggggcagcggcgggagtccggcctcctcctccggcacccagcggcgcggggaggggtcggagcgcaggccccgccgggaccgccgcagcagcagtggccgcagcaaagagcgccaccgcgagcaccggcggcgggatgggcagcgcggtggcagcgaggcctccaagtcccgcagccgccacagccacagcggcgaggaacgggccgaggtcgccaagagcggcagcagcagcagcagcggcggccgccggaaaagcgcttcggccacatccagcagcagtagcagccgcaaggaccgggactcgaaggcccaccgcagccggactaagtcgtccaaggagccgccttcggcctacaaggaaccgcccaaggcctaccgggaggacaagaccgagcctaaggcctacaggcggcggcggtccctcagcccactgggaggccgggacgacagcccggtgtcccacagggcctctcagagcctgaggagccgcaagtcccccagcccggcaggaggtggcagcagcccctattctcggcggctgccgcgctccccgagcccctacagtcgccgccgctcccccagctacagccgccacagctcctacgagcggggcggcgacgtgtcccctagtccctacagcagcagcagctggcgccgctctcgcagtccctacagccctgtgctcagacggtctggaaaatcccgaagcagaagcccgtattcatctaggcattcaagatctcgtagcaggcacagattgtctagatccagaagtcgtcattctagtatttctcctagcacactaactctgaagagtagcctggcagctgaattgaacaagaataaaaaagcacgagcagcagaggcagcaagagccgcagaagcagcgaaagctgcagaagcaactaaggctgctgaggctgctgccaaggctgcaaaagcttcaaacacttctacacctaccaaggggaacacggaaactagtgccagtgcatcacaaacaaaccatgtgaaggatgtgaagaaaattaaaattgaacatgcaccttctccctcaagtggtggaactttaaaaaatgacaaagcaaaaacaaagccacctcttcaggtaacgaaggtggaaaataatttgattgtagataaagccaccaagaaagcagtcatagttggaaaggagagtaaatctgctgctacaaaggaggaatcagtatctcttaaagagaaaaccaaaccacttacaccaagcataggagccaaggagaaggagcaacatgtagctttagtcacctctacattaccaccgttacctttgcctcccatgctgcctgaagataaagaagctgatagcttacgaggaaatatttcagtaaaagcagttaaaaaagaagtagaaaagaaactccgatgtcttcttgctgatttaccgctgccccctgagctaccaggaggagatgatctttcaaagagtccagaggaaaagaaaacaacaacacagttacatagtaaaaggaggcctaaaatatgtgggcctcgctatggtgaaaccaaagaaaaagatattgactggggaaaactctgcgtggataaatttgatatcatcggaattattggagaaggtacttacggacaagtttacaaagccagggataaagacactggagaaatggtagccttaaaaaaagtacgtctggataatgaaaaggaaggctttccaattacagcaattcgagaaattaaaattctccggcagcttacccatcagagtattatcaatatgaaggaaatagtgactgataaagaagatgctttggatttcaagaaggacaaaggtgcattttatctggtgtttgaatatatggaccatgatctgatgggactactggaatcaggcttggttcattttaatgaaaatcacataaagtcatttatgagacagctcatggagggtctggattattgtcataagaagaactttttgcatagagatattaaatgttccaatatccttctaaataatagagggcagataaaacttgcagactttggacttgctcgattgtatagctcagaagaaagtcggccgtatactaacaaggtaattactttatggtaccgtccacctgaactgctactgggagaagaacgatacacaccagccattgatgtatggagctgtggctgtatccttggcgaactcttcactaaaaaacctatatttcaagcaaatcaggaacttgcacaactagaattaataagccgaatatgtgggagtccatgtcctgcagtgtggcctgatgtaatcaaactaccatatttcaacaccatgaaaccaaagaagcaatatcgtcgaaagttaagagaagaatttgtttttattcctgcagctgcgctagacttatttgattacatgcttgccttggatcctagtaagcgctgcactgctgaacaggctcttcagtgcgagttcctccgagatgtggaaccctcaaaaatgcctccaccagatctccctttatggcaagattgtcatgagttatggagtaaaaagcgaagaagacagaagcagatgggcatgactgatgatgtttccacaattaaagcccccaggaaggacttgtctctgggcttggatgacagcagaaccaacacaccccagggtgtgctgccatcttcacagctgaaatctcagggcagctcaaatgtggcacctgtaaaaacaggccctggacagcacttaaaccacagtgaattggcaattctactaaacctactacaatctaaaacaagtgttaatatggctgattttgtccaagtgttgaacattaaggtaaactctgagactcaacagcagctaaataaaataaaccttcctgctggaattttggcaacaggtgaaaaacagacagatccatcaacaccacaacaggagtcttcgaaaccgttgggaggaattcagccttcttctcagaccatccagcctaaaatggagactgatgctgcccaggcggctgtgcagagtgcatttgcagttctgttgactcagttaataaaggctcagcagtcaaagcagaaagatgtgctactagaagagagggaaaatggatcgggacatgaagcgtcattacaactcaggccacctccagaacctagcactccggtgtcgggacaagatgacctcatccagcatcaagatatgaggatcttggagctaacgccagaaccagaccggcctcgaattctgcctcctgaccaacgacctcccgagcctcctgaaccaccaccagtcactgaggaagatctagattatcggacagaaaaccagcatgtacccaccaccagttcttcattaactgaccctcatgccggagtgaaggcagccctgttacagctgcttgctcagcatcagccccaggatgaccccaaaagagaaggtgggattgattatcaagcaggagacacttacgtgtccacttcagactacaaggacaactttggatcctcttctttctcttctgctccttatgttagcaatgatggtctaggaagcagttctgctccaccactagaacgacgtagtttcattggaaattcagatattcagtctttggataactacagtactgcttcatctcattctggtggtccacctcagccttctgccttttctgagtcatttcccagttcagtagctggatatggagacatttacctcaatgctggtcccatgttgtttagtggagacaaggaccatagatttgaatatagccatggtcctattgcagtcctggcaaacagcagtgacccttccacggggccagagagtactcatcctttgccagcaaagatgcacaactataactatggtggtaacttacaggaaaatccgagtggccccagcctcatgcatggacagacctggacttctcctgcccaaggacctggatattcacaaggatacaggggacatattagcacatcaactggcagaggcagaggcagagggttaccatactgagtatctgtttttcctcaggcacatcatttttatctggaaagacttttctagctgcaatttaaggcagcaatccaagagacttgaataataataattcaacaacagctttatttttatgtggagaagggtcttgcatacaatagtttaaaaaagacaaaaaaaacctttgcttaaattcatgctgttctaaaaactagatcgattgtacatcttcacaaattctagttaacaattttattttgtattcttgcagttttaagtggatgctaattttaggggcataagccttttatggccctcttgcagatcttctgaactatgcacatttgtgctttttttgtaagtttggaccaacttttatgtaacaaacagcccctccccacctccagttttacaacaatcagaaagggcactgatttatttggtatttttctttttacaaagctacctttagtcaaaggtcactgtcagtctttgcacctgctttcagtgttattgtgaaaggtgtactttgtgctcatttcagaaaataaaacacaacctttctcttgatgcaacagttttataaaaaaaaa

SEQ ID NO: 94 - DNA, 5463 bp, Homo sapiens
gtcaggtggagcgtgggcgccagagcagcccctctgccttgggtgtcttggagatgacttggcgccccccggagccccgtcatggctgtggctgcgtccacaacactgcatcagcagagtcctggggaagccatttaggaatctgaagcccgggatttctgctttgtcccttcaggggttcctgagcctgttaaaaaaaaaaaaaaatctaggaagaggccctggaaggaaaaaggggagggagatagcctattttacaaggtctgaaatgatgtgtcttatccttctggcttaaaccaagctgggcttaaaacatcttttaaaaaaaatctgtattctatttttttctctctgtttatcgctctccttctgcctctgttaatctttgtttctgtgtagttgcatcctgtttctgtctgaaaacccttgtctttctgaatccatctttcagtctctcacattctgtctttcccctcctccttcaccttccctccgtccctctcccttgcgcacttgccgggtaccagctgagtgcatccttttcccaaacctgctctgcttccaaggggcccttttctgtctcctccacctgtccccatgttttggggactgcctggaaatccgggacaccctcctgaggagggagctggtgcccaacggcacctcttaggatgaacccagccagctgcgttcctggcctctgcagaatggcatacagaaggcattttaagcaagcgagctgagctcgccgcaggactccgactaccaggcaccggtggcagcacgcaaagggtgtccctgtccctcaaggggtcatggcctccatgttgctcgcccagcgcctggcctgcagcttccagcacagctaccgcctgctggtgcctggatccagacacattagtcaagctgcagccaaagtcgacgttgaatttgattatgatgggcctctgatgaagacggaagtcccagggcctagatctcaggagttaatgaaacagctgaatataattcagaatgcagaggctgtgcattttttctgcaattacgaagagagccgaggcaattacctggttgatgtggacggcaaccgaatgctggatctttattcccagatctcctctgtccccataggttacagccaccccgccctgctgaaactcatccaacagcctcaaaatgcgagcatgtttgtcaacagacccgccctcggaatcctgcctccggagaactttgtggagaagctccggcagtccttgctctcggtggctcccaaagggatgtcccagctcatcaccatggcctgcggctcctgctccaatgaaaacgccttaaagaccatcttcatgtggtaccggagcaaggaaagagggcagaggggcttctcccaggaggagctggagacgtgcatgattaaccaggcccctggctgccccgactacagcatcctctccttcatgggcgcgttccatgggaggaccatgggttgcttagcgaccacgcactctaaagccattcacaagatcgacatcccttcctttgactggcccatcgcaccgttcccacggctgaaataccctctggaagagtttgtgaaagagaaccaacaggaggaggcccgctgtctggaagaggtggaggatctgattgtgaaatatcggaaaaagaagaagacggtggccgggatcatcgtggagcccatccagtccgagggtggagacaaccacgcatccgatgacttctttcggaagctgagagacatcgccaggaagcatggctgcgccttcttggtggacgaggtccagaccggaggaggctgcacgggcaagttctgggcccatgagcactggggcctggatgacccagcagacgtgatgaccttcagcaagaagatgatgactgggggcttcttccacaaggaggagttcaggcctaatgctccctaccggatcttcaacacctggctgggggacccgtccaagaacctgttgctggctgaggtcatcaacatcatcaagcgggaggacctgctaaataatgcagcccatgccgggaaggccctgctcacaggactgctggacctccaggcccggtacccccagttcatcagcagggtgagaggacgaggcaccttttgctccttcgatactcccgatgattccatacggaataagctcattttaattgccagaaacaaaggtgtggtgttgggtggctgtggtgacaaatccattcgtttccgtcccacgctggtcttcagggatcaccacgctcacctgttcctcaatattttcagtgacatcttagcagacttcaagtaaagaagccatttccactacagtgagaaagcccggatcccaacagttgtcaaattgattagtttgcctaattcatgttttcacttaaaagtatcagaggtgaatgcacagtgaagggtgatttgtggggagggagcatttttggtggtcttgggggaggggaggggagggaagggctggtgttgattttcctccctgcagagccaatggtgcacattggtttaagcccagagatcctgcttgagccctggactcatcttgggaagggccatgggaggtcctggctagagttctgcccaaccttgaccaaccccagcaatttttccaaaagccagtcaagggcattacatttgttcctgggactggcagctgggcctcctgggtgccagtccatctcaagtgccatattctgtgatcacggatgttggctccccctcgccctatgcaagcaaacacactctcacctcctctcccagcctcccggagctctgagcacgccccacgcatggtgcaggagggactggacagatctgaggaaggccgtaaaatggggacaggaggattcagctcaggagtaagggaagaggtcctctggccccctgaagatgagaatcacccctctcagtgcacctggggatccccctaaactgtgaattctgccctggacagggctttgcccttggaggatccccaggtggccttacccgtgattcttactcggcatcctccattccccaaactccctcctccctgttaaatgtcaacctagacctggacctgggtgggaggaaactgtagcctgagtgtccacagggacacacgtgagccacagggctagaagcacaggcccgtcaccccaggaggaaaagcccagggtctggggcagcagagccatcgcatcatgtttcccagggcaacttgaggtctgacttttggctccctcgccctaagaggctcttcctctcttttgctcatccaccttcacaccacttgtgagctgacccccaggaacagcttggctgttccaccagagcagagggaatcattgctggactggatttcttctggagggaagcaccatgaattaaaggtgccagagctccatgcatggaaaagtggcctgttggttcaacgtggtttccttgtacttgatcctcctgaaatgagagattttcctgagatgactgagtatggagattaccaggcagatgataccgaaatgcttaaaggggctgtggctgaggctgtagcatctctgctggaggtgagacactctgggaactgatttgacctcgaatgctcctaaaagagaacttgatagcctgacagcagagaagtattatttggtggggagtctgagaaagcctggcttgtattatctgtccaaaaggaagcctcttcatctcccggtgccttggttgactattttggaaataggcatatcaaggttcctgattcagcactttgctcttttaataacaaatcgtccaaagatctcaaagtaagggtttttttttttagcttccactcttccgcagacttggtcatcgacctatttttgttgaagaatgaaaggcaatgacaagtttaacatatacaaattcgtgaattcttgttcattttgcattcctgcagtcagtgctaatccgtcgttcttaatcaggagttctgccaggtttaaggtcacctgcactcccagccaagtggtgatgtatgcctcccactctctgcaaggttttcctcatttttatattcatttattcatcattcattcattcacctaactttcattaaatagctgcaccatcccaggccctgtgcggagcatcgggaatacaaagatgagataaaacattgtccctgcccccgggggctcacatgccactggaaacaacagactcttaaactaacaattcaagcaggcgccaagtgctatgacagaggtgtgaataaaagcatcaggaaatcggatggagaaccaccattcacccaagggtcagaggaggtttcaaagaaaaggtgtcattggagcagtgttttgcagaatgagccagagttcaccaagcaggcaaggcaaggaagggtgttgcagagagggaacagcatatgcaaaggcgtatcagttcatggcatcacatctttcactggggaagccagtttccacaggcagcatcccaaggttcaataaggccttatttaacaagcaagcaaaatgcaaaccaaaccattattcatttattggcttaagtatgctttctcctgaaaactttagcattgggtgcaaatattcagtatggttctcggagtccaaagggttttaagccagggcacaaccagaaaagtggctctctttggtagggagaggggctccaatatttcgttctctccccatggggcactgacagagaaatgaaatagttttatctggaaaattccagagctattatttactccttaccaagggaagttacttcttgtaaaaacttttaagccatttatcaacaagttcttgttgactcagggcataatgagttcctgagacatgctcttttgggggctggggctttagctagaagaatttcaaggaaaagaattctcagcagagctcaagattgtagaaactcagcagaagctggtaaaaacatggggagcccggaggacaggctgctgtccagggcagaggccatgaagaagtgcttccgtggccgacagtctggaaatgaatccatcatacattagtgccatagagtttagtaaccgtccagcaagtgtcatcacttttacagaaaacaaggtccagtaatagcaagtcttagtacatcctcacttttattataaatgggtgttttttcataatttttactgacgctcagtaaccatgcaaaattgtgtatagcattaatgtatctacatacctacacctatctatatataagctcatggtagaaaaccatagctaagtagcatcgcagacttaagcgtacaaagtgatcttgttcacaagtaatctgttgacagtgccaataaatgataaaaaaaaaattaacatgtcacaatgtaacggatgaccatatgcacaattccatgaattaaatctgtttcctgtgttagtcagtattcttaaataaaatttataattgaaacatga

SEQ ID NO: 95 - DNA, 3181 bp, Homo sapiens
ggcggccgctcgggcaggatggcggcggccgcggtgggcgcgggccacggcgcggggggcccgggcgcagcgagcagcagtggtggggcgcgcgagggcgcgcgggtggcggcgctgtgcctgctgtggtacgcgctgagcgcgggcggcaacgtggtcaacaaggtgatcctgagcgccttcccgttcccggtgaccgtgtcgctgtgccacatcctggctctgtgcgctgggctcccgccgctgctgcgcgcctggcgcgtgccccccgcgccgcccgtctcgggccccggacccagtccgcatccgtcgtccggcccgctgctgccgccgcgcttctacccgcgctacgtgctaccgctcgccttcggcaagtacttcgcgtccgtgtcagcgcacgtcagcatctggaaggtgcccgtgtcctatgcacacaccgtcaaggccaccatgcccatctgggtggtcctcctgtcccggatcattatgaaggagaagcagagcaccaaggtatacttgtcactcatccccatcatcagcggtgtcctgctggccaccgtcaccgagttgtcttttgacatgtggggactcgtcagcgccctcgccgccacgctgtgcttctcgcttcagaacattttctccaaaaaggtcttgcgagattcacggatccaccatctccggctgctcaacatcctgggctgccacgccgtcttctttatgatccccacctgggttctggtggacctctcggctttcctggtcagcagcgacttgacctacgtctaccagtggccctggacgctcctgctcctggctgtcagcggcttctgtaactttgcccagaatgttatcgccttcagcatcctcaacctcgttagccccctgagctactcggtcgccaatgccaccaaaagaatcatggtcatcacggtgtccctgatcatgctgcgcaacccagtcaccagcaccaacgtcctgggcatgatgaccgccatcctgggggtcttcctctataacaagaccaagtacgatgcaaaccagcaagccaggaagcacctcctccccgtcaccacagcagacctgagcagcaaggagcgtcaccggagcccactggagaagccccacaacggcctcctcttcccccagcacggggactatcagtacggccgcaacaacatcttaacagaccacttccaatacagccggcagagctacccaaactcgtacagtttgaaccgctatgatgtgtagagtccaaaggacaggaccagactgttggtgactccttccccggcccccacagcagtatcagaaacttctgacaatcagtgaatgtacaacccagccgaggggacggtgcataactctccatcagaagccctggggttcctggccccccgtgagccgcaggaggatgcgttgcctgcagtgcagacggccgtgagctctgggcaaacctaaacagagaccagtgtctcatgctctttcttcctggagtctgtcatctgagggccgtgtccctgcggagatcttggccacgttgtacctttccatgtggaattattccccaagcagtgtagctcagagcacttgtgtctgcattccagataacattcaggacctgtgtgaaaagctggggtcactgtggctgtagaccatgaactggcagtgggggtgtccagggcggtgcttgagaacgtcagactggctagtttaattccctggcgcagatacgcataggaccaacagggtcaccaagcagacagggagcccgcgagaatcattcaaaacatccccagccacagagatggatccagtttcctggtcatccccttagcagttcacaagttcctggcaaatgttccaaagcaaaaagcgattgcaattagcatccagttcctgcagcctggtgctctgccctgcacgtcagggttggcatccacccagatccagatggaagggaaacttctctcttctcctttgcctcctcttccctcaccagagcagggcgcttctcttggggtggtgagaaggatcttcgagaaatcgtgttcagtatttcaagctctatttctgtggcacatgtcttttgagaggcatcttcacctcttctgtgatgacttggtatgttgtttggtagagagatcttgattttcggaggatcttgcatttttctagggaatattttgtagttgtgtgtgtgtgtttttgccttggtccccattatgggatgcattaggactggcctatgcatcgaaaatctttttgtttgtaaacgttttaaaaacaaagttccccggccaggcacggtggctcacacctgtggtcccggcactttgggaggccaagatgggcggatcacgaggtcaggagttcgagaccagcctggccaacatagtgaaaccccatctctactaaaaatacagaaattagccgggcatggtgtcgcgtgcctgtagtcccagctcctcaggctgctgaggcaggcgaattgcttgaacctgggaggcagaagttgtggtgagccgagattgtgcactccagcctgggtaacagagcgagactccatctcaaaaaaaaaaacaaaacaaaaccaagttcccactggtgatgcctgtctgacacgttttggtatttagtaggaaatgaagtgtttcgaagcttcgagagaagcttcaaaattgtcacaattgctgaaaacagaatgaatcgtgaacattatctcaatattttgtataatagacaagaccacagtgttttggttccctgacctgtttttgtgtttatgttaggatctgaatcatgttctgggtaaggggacgaggagcgaacactgcactaagatttggtttgccaaatcagattctttggtcaagagtcagtttggggccaggcgtggtggctcatgcctgtaatctcagcactttgggaggctgaggtgggtggatcactggagtttgagaccaccctggccaacatggtgaaaccccatctctactaaaacaaaaattagccaggcatggtggcacctgcctgtaatcccagctacttgggaggctgaggcaggagaatcacttgagcccaggaggtggaggtttcagcgagctgagatcacaccactgcactccagccttggtgacagagtgagactctgtctcaaaaaaaaaaaaaaaaaaaaaaa

SEQ ID NO: 96 - DNA, 2868 bp, Homo sapiens
cgaccgggacggcccgttttccgccagctcgccgctcgctatggcgtcgctcaccgtgaaggcctaccttctgggcaaggaggacgcggcgcgcgagattcgccgcttcagcttctgctgcagccccgagcctgaggcggaagccgaggctgcggcgggtccgggaccctgcgagcggctgctgagccgggtggccgccctgttccccgcgctgcggcctggcggcttccaggcgcactaccgcgatgaggacggggacttggttgccttttccagtgacgaggaattgacaatggccatgtcctacgtgaaggatgacatcttccgaatctacattaaagagaaaaaagagtgccggcgggaccaccgcccaccgtgtgctcaggaggcgccccgcaacatggtgcaccccaatgtgatctgcgatggctgcaatgggcctgtggtaggaacccgctacaagtgcagcgtctgcccagactacgacttgtgtagcgtctgcgagggaaagggcttgcaccgggggcacaccaagctcgcattccccagccccttcgggcacctgtctgagggcttctcgcacagccgctggctccggaaggtgaaacacggacacttcgggtggccaggatgggaaatgggtccaccaggaaactggagcccacgtcctcctcgtgcaggggaggcccgccctggccccacggcagaatcagcttctggtccatcggaggatccgagtgtgaatttcctgaagaacgttggggagagtgtggcagctgcccttagccctctgggcattgaagttgatatcgatgtggagcacggagggaaaagaagccgcctgacccccgtctctccagagagttccagcacagaggagaagagcagctcacagccaagcagctgctgctctgaccccagcaagccgggtgggaatgttgagggcgccacgcagtctctggcggagcagatgaggaagatcgccttggagtccgaggggcgccctgaggaacagatggagtcggataactgttcaggaggagatgatgactggacccatctgtcttcaaaagaagtggacccgtctacaggtgaactccagtccctacagatgccagaatccgaagggccaagctctctggacccctcccaggagggacccacagggctgaaggaagctgccttgtacccacatctcccgccagaggctgacccgcggctgattgagtccctctcccagatgctgtccatgggcttctctgatgaaggcggctggctcaccaggctcctgcagaccaagaactatgacatcggagcggctctggacaccatccagtattcaaagcatcccccgccgttgtgaccacttttgcccacctcttctgcgtgcccctcttctgtctcatagttgtgttaagcttgcgtagaattgcaggtctctgtacgggccagtttctctgccttcttccaggatcaggggttagggtgcaagaagccatttagggcagcaaaacaagtgacatgaagggagggtccctgtgtgtgtgtgtgctgatgtttcctgggtgccctggctccttgcagcagggctgggcctgcgagacccaaggctcactgcagcgcgctcctgacccctccctgcaggggctacgttagcagcccagcacatagcttgcctaatggctttcactttctcttttgttttaaatgactcataggtccctgacatttagttgattattttctgctacagacctggtacactctgattttagataaagtaagcctaggtgttgtcagcaggcaggctggggaggccagtgttgtgggcttcctgctgggactgagaaggctcacgaagggcatccgcaatgttggtttcactgagagctgcctcctggtctcttcaccactgtagttctctcatttccaaaccatcagctgcttttaaaataagatctctttgtagccatcctgttaaatttgtaaacaatctaattaaatggcatcagcactttaaccaatgacgtttgcatagagagaaatgattgacagtaagtttattgttaatggttcttacagagtatctttaaaagtgccttaggggaaccctgtccctcctaacaagtgtatctcgattaataacctgccagtcccagatcacacatcatcatcgaagtcttccccagttataaagaggtcacatagtcgtgtgggtcgaggattctgtgcctccaggaccaggggcccaccctctgcccagggagtccttgcgtcccatgaggtcttcccgcaaggcctctcagacccagatgtgacggggtgtgtggcccgaggaagctggacagcggcagtgggcctgctgaggccttctcttgaggcctgtgctctgggggtcccttgcttagcctgtgctggaccagctggcctggggtccctctgaagagaccttggctgctcactgtccacatgtgaactttttctaggtggcaggacaaatcgcgcccatttagaggatgtggctgtaacctgctggatgggactccatagctccttcccaggacccctcagctccccggcactgcagtctgcagagttctcctggaggcaggggctgctgccttgtttcaccttccatgtcaggccagcctgtccctgaaagagaagatggccatgccctccatttgtaagaacaatgccagggcccaggaggaccgcctgccctgcctgggccttggctgggcctctggttctgacactttctgctggaagctgtcaggctgggacaggctttgattttgagggttagcaagacaaagcaaataaatgccttccacctcaccgcaaaaaaaaaaaaaaaaaaaaaaa

SEQ ID NO: 97 - DNA, 3580 bp, Homo sapiens
agttctggccgctgtcccggtgcgcacggacgtggctcgagtttcctctgctctccgctctcgcccgctagctctcctcccttccgctcctgcttctctccgggtctcccgctccagctccagccccacccggccggtcccgcacggctccgggtagccatggaggaccccacgctctatattgtcgagcggccgcttcccgggtaccccgacgccgaggccccggagccttcctccgctggggctcaggcagcggaggagccgtcgggggccggctcagaagagctgatcaagtcggaccaggtgaacggcgtgctggtgctgagcctcctggacaaaatcatcggggccgtagaccagatccagctgactcaagcacagctggaggagcggcaggcggagatggagggcgcagtgcagagcatccagggcgagctgagcaagctgggcaaggcgcacgccaccacgagcaatacggtgagcaagctgctggagaaggtgcgcaaggtcagcgtcaacgtgaagaccgtgcgcggcagcctggagcgccaggcggggcagatcaagaagctggaggtcaacgaggccgagctgctgcggcgccgcaactttaaagtcatgatctaccaggatgaagtgaagctgccggccaaactgagcatcagcaaatcgctgaaagagtcggaggcgctgccagagaaggagggcgaggagctgggcgagggcgagcggcccgaggaggacgcagcggcgctggagctttcgtcggacgaggcggtggaggttgaggaggttattgaggagtcccgcgcagagcgtatcaagcgcagcggcctgcggcgcgtggacgacttcaagaaggccttctccaaggagaagatggagaagaccaaggtgcgtacccgcgagaacctggagaagacgcgcctcaagaccaaggaaaacctggagaagacgcggcacaccctggagaagcgcatgaacaagctgggcacgcgcctggtgcccgccgagcggcgcgagaaactgaagacgtcgcgagacaagttgcgcaaatccttcacgcccgaccacgtggtgtacgcgcgctccaagaccgcggtctacaaggtgccacccttcaccttccacgtcaagaagatccgcgagggccaggtggaagtgctcaaggccaccgagatggtggaggtgggcgccgacgacgacgagggcggcgcggagcgcggggaggccggcgacctgcggcgcgggagcagccccgacgtgcacgcgctgctggagatcaccgaggagtcggacgccgtgctggtggacaagagcgacagcgactgagccgcccccgctgccacccaccccattcctcgctccttccgaacttcctctttcgcattctctctcggctcgagctggctgagatttttctaaattgaaaacacgcccccctccccacacctccaggaactccactcccagtcttagagctgttaggacccgatggggaggcagcccccgcagtggacagcccccgcttggacacagtccgagtggaatgggaagggaatggtcaatccctgtcctggttgtccaagtcgggatctcagaggaaattgcagtgattccacggttaggcccccctgggggggctgccttcccctcagcctctccccacaccacccacccagctgctgtcattccgctcactgagctcttcttcattctcaccctgatccctgggggactcaaagccaaaactgcccaaagaggaaagattgaatcctaaaggggatccttgcccccatgggaggccccctactagaaggacgtgaaagcagcttttgggggaaactgaggcagtggggaagacagagcagaatgagccctcaccctggctgggggtccagcacaggctgtatctgcagagggtcccagaggaacgctggagccaagagaagccctgggaaggaggggtggggaacgacatgcatgtgagggatggcacactgatgtgtttatgcacctgtacacaggagcgcatggccatggctttggaaaggagaatggaaaaatagaagaaggtcggccgggcttggtggcttaagcctgtaaccccagcactttgggaggccgaggtgggcggatcacctgaggtcaggagttcgggaccagcctggcaaacaccccatctctactaagcgaaaacccatctctactaaaattacaaaaattagctgggcatggttgcgcatgcctgtaatcccagctactttggaggctgaggtggggagaattgcttgaacctgggaggtggaggttgcagtgagccaaggtcgcgacactgcactccagcctgggtgacagagtgagactccatctcaacagaaggaaaaaaaaggaaaataggagaaggtggaaatgggtgaagagagaagtcccctcactagctgcatgagaaatctatcttactgtggttctccatgggcagcaggaccatttttcagaatcaagagggaggacagtgtgagaaggcgatgatccaaagaagacagagaggtcagccccacccgatccctcaaatgggctcttggaggcacccccaggggcagcccatttctcaaagtccagaaaattagggtcccagaagggggcagcagcaggctgggagttaggagggagagcagggtgccggccctgccaccaagttgagagctggaggggaggtggggagagaacatcacagagcagccagccctggttcactcctggcagtttcttctcaagctccttccctaggagcatggtggcacgtgcctgtggtctcagctacttgggaggctgaggcgggaggatcgccagagcccaggagtttgaggctgcagtgagctatgagggtgcctctgtgctccatcctaggcaacagagtgagacgctgtttaaaaaggaaaaaatccttccctagagctagtatcctaaagctgcagagctagcccagacctcattggtttccttgtccttggggtgcttttcctgaatctttgggggtgaagggagtgttgctcccagtccagaggcctgattctgttcggactgggttctcaagacacgaccaggttctcaagacacgagtccccttgttcctccccattaaagggggtttgtcagaagcaagaacagcccctctccccagtcacagcctgaagggaggccccgagagcttcctccttccccccacctgctccttaccttctctgccctgctttttagaactgcagttcattgttttaagggattgggggagggagcctggggacacaaaccttttatacaatacaaagctttgcttttttttttttttttcttccttttccctttctcggttctcttctctcctctgaatggctgaagacccctctgccgagggaggttggggattgtgggacaaggtcccttggtgctgatggcctgaaggggcctgagctgtgggcagatgcagttttctgtgggcttggggaacctctcacgttgctgtgtcctggtgagcagcccgaccaataaacctgcttttccaaaaaaaaaaaaaaaa

SEQ ID NO: 98 - DNA, 11025 bp, Homo sapiens; identical to SEQ ID NO: 1

SEQ ID NO: 99 - DNA, 6232 bp, Homo sapiens
ctgccagatcagtttgtcaccacccaggctcccttgcctttggctgggtgcaacttccattttaggtgttggatctgagggggaaaaaaaagagagagggagagagagagaaagaagagcaggaaagatcccgaaaggaggaagaggtggcgaaaaatcaactgccctgctggatttgtctttctcagcaccttggcgaagccttgggtttctttcttaaaggactgatttttagaactccacatttgaggtgtgtggcttttgaagaaaatgtatgtactgacgggaaaaggaagataagcaagtcgaatttttgtcttacgctctctccttcctgcttcctccttgctgtggtggctgggatgctccttccatgattttttgaatctagactgggctgttctctgtgttaaaccaatcagttgcgaccttctcttaacagtgtgaagtgagggggtctctctccctccttctccttcctctgtgattcaccttcctttttaccctgccctgcggcggctccgccccttaccttcatggacgactcagaggtggagtcgaccgccagcatcttggcctctgtgaaggaacaagaggcccagtttgagaagctgacccgggcgctggaggaggaacggcgccacgtctcggcgcagctggaacgcgtccgggtctcaccacaagatgccaacccactcatggccaacggcacactcacccgccggcatcagaacggccggtttgtgggcgatgctgaccttgaaagacagaaattttcagatttgaaactcaacggaccccaggatcacagtcaccttctatatagcaccatccccaggatgcaggagccggggcagattgtggagacctacacggaggaggatcctgagggagccatgtctgtagtctctgtggagacctcagatgatgggaccactcggcgcacagagaccacggtcaagaaagtagtgaagactgtgacaacacggacagtacagccagtcgctatgggaccagacgggttgcctgtggatgcttcatcagtttctaacaactatatccagactttgggtcgtgatttccgcaagaatggcaatgggggacctggtccctatgtggggcaagctggcactgctacccttcctaggaacttccactaccctcctgatggttatagtcgccactatgaagatggttatccaggtggcagtgataactatggcagtctgtcccgggtgacccgcattgaggagcggtataggcccagcatggaaggctaccgggcacctagtagacaggatgtgtatgggccccaaccccaggttcgggtaggtgggagcagcgtggatctgcatcgctttcatccagagccttatgggctagaggatgaccagcgtagtatgggctatgatgacctggattatggtatgatgtctgattatggcactgcccgtcggactgggacaccctctgaccctcgtcggcgcctcaggagctatgaagacatgattggtgaggaggtgccatcggatcaatactactgggctcctttggcccagcatgagcgaggaagtttagcaagcttggatagcctgcgcaaaggagggcctccacctcctaattggagacagccagagctgccagaggtgatcgccatgcttggattccgcttggatgctgtcaagtccaatgcagctgcatacctgcaacacttatgctaccgcaatgacaaggtgaagactgacgtgcggaagctcaagggcatcccagtactggtgggattgttagaccatcccaaaaaggaagtgcaccttggagcctgtggagctctcaagaatatctcttttggacgtgaccaggataacaagattgccataaaaaactgtgatggtgtgcctgcccttgtgcgattgcttcgaaaggctcgtgatatggaccttactgaagttattaccggaaccctgtggaatctttcatcccatgactcaatcaaaatggagattgtggaccatgcactgcatgccttgacagatgaagtgatcattcctcattctggttgggagcgggaacctaatgaagactgtaagccacgccatattgagtgggaatcggtgctcaccaacacagctggctgccttaggaatgtaagctcagagaggagtgaagctcgccggaaacttcgggaatgtgatggtttagttgatgccctcattttcattgttcaggctgagattgggcagaaggattcagacagcaagcttgtagagaactgtgtttgccttcttcggaacttatcatatcaagttcaccgggagatcccacaggcagagcgttaccaagaggcagctcccaatgttgccaacaatactgggccacatgctgccagttgctttggggccaagaagggcaaagggaaaaaacctatagaggatccagcaaacgatacagtggatttccctaaaagaacgagtccagctcgaggctatgagctcttatttcagccagaggtggttcggatatacatctcacttcttaaggagagcaagactcctgccatcctagaagcctcagctggagctatccagaacttgtgtgctgggcgctggacgtatggtcgatacatccgctctgctctgcgtcaagagaaggctctttctgccatagctgacctcctgactaatgaacatgaacgggtggtgaaagctgcatctggagcactgagaaacctggctgtggatgctcgcaacaaagaattaattggtaaacatgctattcctaacttggtaaagaatctgccaggaggacagcagaactcctcttggaatttctctgaggacactgtcatctctattttgaacactatcaacgaggttatcgctgagaacttggaggctgccaaaaagcttcgagagacacagggtattgagaagctggtgttgatcaacaaatcagggaaccgctcagaaaaagaagttcgagcagcagcacttgtattacagacaatctggggatataaggaactgcggaagccactggaaaaagaaggatggaagaaatcagactttcaggtgaatctaaacaatgcttcccgaagccagagcagtcattcatatgatgatagtactctccctctcattgaccggaaccaaaaatcagataacaactattccacaccaaatgagagaggagaccacaatagaacactggatcgatcgggggatctaggcgacatggagccattgaagggaacaacacccttgatgcaggacgaggggcaggaatctctggaggaagagttggatgtgttggttttggatgatgaggggggccaagtgtcttacccctccatgcagaagatttagcaccactatctccgttccatctgggcttatatgtacttttattttttggtggtgaaattgactgatgattttcctttttcttcgctggactattgtgccaactgccaggctgcctcctgcccttacagccctaagtggctgccttctttccatcaactcccaacttcttcctgtgaagtttaattgtctcaacgcctccccctcccccattccctccatttttctcccaagaaacctgactcaattatttgcatattttgagaaactgctgcagattagttctttttgccagttttccctggaactcctggccttttgtggaggggagggatggagagaataggaatcttcactagaagccgtgggaagaattggaagttacatgctgtatatgcaatgtccagcagtctgataaactgacgattcttaatcaagatttttttcctgatggggaagggacttttattttcttttagagaggggaaagtgtgagctcttcccttattcctaatggctatttttgaagcaaagaaggccagcaacattggcacatgccacctggcaaaggacccttgagtaagtgaaggtctcctaaaactgggattaagaaaccttgctctcctcatctccaaggcagggaccatcaagaacctacagactccatctcttctgcaagcctcatgccaaccctgggctattgctgctgccccttaaacacaggctgtccttaacccacctctcctgccctgtgatatgtctgctgagttggcctggccatttccaagaggctgtagaaaggggagaatgtcaaggaagacttttggtagagaaggagcagaaagatgtgtttttgggaagaagaagacctctaggaggagctagtaggaatgtacatgaagcaattagtctgaaactggcttccccactcccccgtttctccttttcctatccttataggcctgtcccttgcctctgccctggattggttggcaaactataggacttgatgtacataactcctgtcccttttcccttacaaggtggggattgcccctggctttgcctcttctttgtgcctttggcctggggtgcatctcctcccgcccttccatgtgcctttctttgcctctgcagtctcatttctcataattttgcaaattatattttgttgctttcttacctactattggccctaaatagcagaaagaagagaagtgaccgagagaacctcagattcttcattgaggattggtatagccatgatttcagtcatagcaagcttttgctcaacagcatatgggtgggatttggcaaaaatcctattctgatgaatctcaaagtaaggctggtaagagaagtgagtggtgtgactcttactccttaggtgcccagaatttaccatcatctctgaaggagttacagggaagtggtctccccaattctcccctccctccagtattgccccctctcactttagcatatattaattagcaggttgggctagagaaatcagctgctatgcgggttgattattattattatttctaatccttttccttatttgccttctactccccttaatctaatctaaaagctctgttccatgcaactggagttccttatccctctcttccccttcccttatatattgaggctatggggtaggagaaaagtgcacaacccaccaccccctctactcgtgcattaaaatttcttatttacccttttcccccttcccatttcttcccactttcatctaccttttctggcaaaaaggagccttttgctctctgtgaccctaagagcacactgcacagggaaaattgccccatccagacctggctccactcttgatctctcttgtcctcttctgctcttttcctggtgctcttttttctcggtggggtgtgggtaatagaacagccgtgggcttttggggacctttaacttttttttctctcttttgtttataaaaaacactaaacattcaattccagagaacccaaaatcccaccttcccaccgaacactactaaggggcttgtgttctgctccataccttttctcttttctttctgtcttgttaatgcttttaaaaacaaatgagttttttatataaataaagtttttaaagtgtgtatgtggggggtctgtgtcatttcttcacttcaagctgttatttcttccctgctttgcatctttgttacttccttatgtatcagtgtcctttccagagcaaccagaaggaggttataccaggatttattttgagctcagccccaactctttatcaagcaacattcttgttaactatatgtgaaacattttttcttctgaagattcttaaaaattgaatgtggctgaagttgaacatgggagcttattgctaatttagagataggaaactgaagcataaagaattaatgacttactttaattactggaattcttctgcaacatttgacaaaactaaccttgaataaggcccactgtaatacgtagctctcttaaatataacacttaggactagaagattagaaactaccaatcccaactacgtaataggaaaatgtaggatcaaaaggcccatgtatataagtactgaccactgggccataatgttgcttctcaggctatatgcagtcctttagtcagaagtcaataggcctatttattaatattttacagaccatattacctggattaccagggactatctttgctgcagagatcaagggttaagatctatgggaagatacttatttttctgaggtccttatgtcctgtcatataattaaagactcaagagaatttatgtgaaatgctttctgtatgccccaatctttagattaaaattatatacctgctcct

SEQ ID NO: 100 - DNA, 2763 bp, Homo sapiens
tgggacaggcagctccggggtccgcggtttcacatcggaaacaaaacagcggctggtctggaaggaacctgagctacgagccgcggcggcagcggggcggcggggaagcgtatacctaatctgggagcctgcaagtgacaacagcctttgcggtccttagacagcttggcctggaggagaacacatgaaagaaagaacctcaagaggctttgttttctgtgaaacagtatttctatacagttgctccaatgacagagttacctgcaccgttgtcctacttccagaatgcacagatgtctgaggacaaccacctgagcaatactgtacgtagccagaatgacaatagagaacggcaggagcacaacgacagacggagccttggccaccctgagccattatctaatggacgaccccagggtaactcccggcaggtggtggagcaagatgaggaagaagatgaggagctgacattgaaatatggcgccaagcatgtgatcatgctctttgtccctgtgactctctgcatggtggtggtcgtggctaccattaagtcagtcagcttttatacccggaaggatgggcagctaatctataccccattcacagaagataccgagactgtgggccagagagccctgcactcaattctgaatgctgccatcatgatcagtgtcattgttgtcatgactatcctcctggtggttctgtataaatacaggtgctataaggtcatccatgcctggcttattatatcatctctattgttgctgttctttttttcattcatttacttgggggaagtgtttaaaacctataacgttgctgtggactacattactgttgcactcctgatctggaattttggtgtggtgggaatgatttccattcactggaaaggtccacttcgactccagcaggcatatctcattatgattagtgccctcatggccctggtgtttatcaagtacctccctgaatggactgcgtggctcatcttggctgtgatttcagtatatgatttagtggctgttttgtgtccgaaaggtccacttcgtatgctggttgaaacagctcaggagagaaatgaaacgctttttccagctctcatttactcctcaacaatggtgtggttggtgaatatggcagaaggagacccggaagctcaaaggagagtatccaaaaattccaagtataatgcagaaagcacagaaagggagtcacaagacactgttgcagagaatgatgatggcgggttcagtgaggaatgggaagcccagagggacagtcatctagggcctcatcgctctacacctgagtcacgagctgctgtccaggaactttccagcagtatcctcgctggtgaagacccagaggaaaggggagtaaaacttggattgggagatttcattttctacagtgttctggttggtaaagcctcagcaacagccagtggagactggaacacaaccatagcctgtttcgtagccatattaattggtttgtgccttacattattactccttgccattttcaagaaagcattgccagctcttccaatctccatcacctttgggcttgttttctactttgccacagattatcttgtacagccttttatggaccaattagcattccatcaattttatatctagcatatttgcggttagaatcccatggatgtttcttctttgactataacaaaatctggggaggacaaaggtgattttcctgtgtccacatctaacaaagtcaagattcccggctggacttttgcagcttccttccaagtcttcctgaccaccttgcactattggactttggaaggaggtgcctatagaaaacgattttgaacatacttcatcgcagtggactgtgtccctcggtgcagaaactaccagatttgagggacgaggtcaaggagatatgataggcccggaagttgctgtgccccatcagcagcttgacgcgtggtcacaggacgatttcactgacactgcgaactctcaggactaccgttaccaagaggttaggtgaagtggtttaaaccaaacggaactcttcatcttaaactacacgttgaaaatcaacccaataattctgtattaactgaattctgaacttttcaggaggtactgtgaggaagagcaggcaccagcagcagaatggggaatggagaggtgggcaggggttccagcttccctttgattttttgctgcagactcatcctttttaaatgagacttgttttcccctctctttgagtcaagtcaaatatgtagattgcctttggcaattcttcttctcaagcactgacactcattaccgtctgtgattgccatttcttcccaaggccagtctgaacctgaggttgctttatcctaaaagttttaacctcaggttccaaattcagtaaattttggaaacagtacagctatttctcatcaattctctatcatgttgaagtcaaatttggattttccaccaaattctgaatttgtagacatacttgtacgctcacttgccccagatgcctcctctgtcctcattcttctctcccacacaagcagtctttttctacagccagtaaggcagctctgtcgtggtagcagatggtcccattattctagggtcttactctttgtatgatgaaaagaatgtgttatgaatcggtgctgtcagccctgctgtcagaccttcttccacagcaaatgagatgtatgcccaaagcggtagaattaaagaagagtaaaatggctgttgaagc

SEQ ID NO: 101 - DNA, 1957 bp, Homo sapiens
cccggggccgcggagccgggccggggcagcgccgtctccgcctcggggccgccgggggcgccctgctgagcgctacccacgtgcgtccgcgccacctcgcgggcgaccccgcggccaaggcccccggcggagcggctcccgggcgccccgaactagcccccaactttgggcgaagtttgcctgcgcctctccccgcccccacgcggcgcgccggggccgcggacggcagcggcccccggggatgcgccttcccggggtacccctggcgcgccctgcgctgctgctgctgctgccgctgctcgcgccgctgctgggaacgggtgcgccggccgagctgcgggtccgcgtgcggctgccggacggccaggtgaccgaggagagcctgcaggcggacagcgacgcggacagcatcagcctcgagctgcgcaagcccgacggcaccctcgtctccttcaccgccgacttcaagaaggatgtgaaggtcttccgggccctgatcctgggggagctggagaaggggcagagtcagttccaggccctctgctttgtcacccagctgcagcacaatgagatcatccccagtgaggccatggccaagctccggcagaaaaatccccgggcagtgcggcaggcggaggaggttcggggtctggagcatctgcacatggatgtcgctgtcaacttcagccagggggccctgctgagcccccatctccacaacgtgtgtgccgaggccgtggatgccatctacacccgccaggaggatgtccggttctggctggagcaaggtgtggacagttctgtgttcgaggctctgcccaaggcctcagagcaggcggagctgcctcgctgcaggcaggtgggggaccacgggaagccctgcgtctgccgctatggcctgagcctggcctggtacccctgcatgctcaagtactgccacagccgcgaccggcccacgccctacaagtgtggcatccgcagctgccagaagagctacagcttcgacttctacgtgccccagaggcagctgtgtctctgggatgaggatccctacccaggctagggtgggagcaacctggcgggtggctgctctgggcccactgctcttcaccagccactagagggggtggcaacccccacctgaggccttatttccctccctccccactcccctggccctagagcctgggcccctctggccccatctcacatgactgtgaagggggtgtggcatggcagggggtctcatgaaggcacccccattcccaccctgtgccttccttgcgggcagagagggagagaagggctccccagatctacacccctccctcctgcatctcccctggagtgttcacttgcaagctgccaaaacatgatggcctctggttgttctgttgaactccttgaacgtttagaccctaaaaggagtctatacctggacacccacctccccagacacaactcccttccccatgcacacatctggaaggagctggcccctcagtcccttcctactccccaacaaggggctcactatccccaaagaaggagctgttggggacccacgacgcagcccctgtactggattacagcatattctcatctctggccccgaggctgcctgtggggcgagtggagacctcccatcactgagacagatcacagaccacgagtgcctttcccggacctggacgttgcctccagagcaggcaccagctctttccctctctacacagaaatatttttgtaaggttctggggcagggagggagcatgaagtacgaggaaaacttgaattccagatttttagtgcaaagtatttatcatttctaccagaaataaacgttttaagtttttacttgaaaaaaaaaaaaaaaaaaaaaaaaaaaaaaaaaaaaaaaaaaaaaaaaaaaaaaaaaaaaaaaaaaaaaaaaaaaaaaaaaaaaaaaaaaaaaaaa

SEQ ID NO: 102 - DNA, 3584 bp, Homo sapiens
ctcgccggagtagaccgggctgggattggtgtgaggaggggccagagcccgcgggcgtcccgggccgaggcgcgggagaggcggtggacaccgagaagcccgccggcggcttgcaattccctcacccggcgcgcgcctttcgcagagggaaggagcaagagggcccctacctcatcgtgcgcgggtggggtcggcgcttgtcgcgtgtggcgcgcagtggggcgggcggcgggaggggggtggcagtggagggagcgagaggtgcaggggtgactttgttggcagcaggactagctggagagctagacctggaagcgcatccggggaggacttgcggggcagaggagggcgtgggcgtgtctggtatgggatgcagtggaaaggagggggccctcctgagtagatctgtgggtgattccttcgaggacgcctcgtcttcccgtctgcccttttatttgtcagcgagggagtccccatggtctctgttcaagttctggagactttctctttgggtgggcttaatcacctgctactaaatcgtagaactgcccagggccctttctaatattggtcacaaacgtgaggagtatgtcagaaaacagaaaaccgctgctgggctttgtaagcaaactcactagtgggactgcacttgggaactcaggcaagactcactgccccctgtgcttggggcttttcaaagcccccaggctcttgccttgtttgcatacagtttgcaccacgtgtctggagcagctggagcccttctcagtagtggacatccgagggggagactctgacacaagctctgaggggtcaatattccaggaactcaagccacgaagtctgcagtcgcagatcggcatcctttgtcctgtatgtgatgctcaggtggacctgcccatgggtggagtgaaggctttaaccatagaccacctggccgtgaatgatgtgatgctggagagcctacgtggggaaggccagggcctggtgtgtgacctgtgcaacgacagggaagtagagaagaggtgtcagacctgcaaagccaacctctgccacttctgctgccaggctcataggcggcagaagaaaacgacttaccacaccatggtggacctaaaagacttgaaaggctacagccggattgggaagcccatcctgtgtcctgttcaccctgcagaggaactgaggctgttctgtgagttctgtgaccggcccgtgtgccaggattgtgtggtgggggagcatcgggaacacccctgtgacttcaccagcaatgtcatccacaagcatggggactctgtgtgggagctcctcaaaggtactcagccccacgtggaggccctggaggaagccctggctcagatccacataataaacagtgccctccagaagcgagtggaggcagtggcagctgatgtccggacattctcggagggctacattaaggccattgaggagcatcgggacaagctgctgaagcagctggaagacatacgggcccagaaggaaaattccctgcagctgcagaaggcccagctggaacagttactggcagacatgcggactggagtggagttcaccgagcacttgctgaccagcggctcagacttggagatcctcatcaccaagagggtggtggtagaacggctcaggaagctgaacaaagttcaatatagcacccgtcctggagtaaatgataagatacgcttctgtcctcaggagaaagcaggccagtgccgtggctatgaaatttatggtacgattaataccaaagaggttgatccagccaaatgtgtcctacaaggagaagacctccacagagcccgggagaaacagacggcctctttcaccctgctttgtaaggatgccgcaggagaaatcatgggcaggggaggagacaacgttcaagttgccgttgtccctaaagataagaaagacagcccagtcagaacaatggtccaggataacaaggatgggacatactacatttcctacacccccaaggaacctggcgtctatactgtgtgggtctgcatcaaagaacagcatgtgcagggctcgccattcactgtgacggtgaggagaaagcaccgcccacactcaggcgtgtttcactgctgcaccttctgctccagcgggggccagaaaaccgctcgctgcgcctgtggaggcaccatgccaggtgggtacctaggctgtggccatggacacaaaggccacccaggtcatccccactggtcatgctgtggaaaatttaatgagaaatctgaatgcacatggacaggtgggcagagcgcaccgaggagtctacttaggactgtggctctctgatgggtttgtgctcagccttttaaagctgcaggcagcaccacttgagatttccagaggacccagaccttcgttcattctaaagagactgatagaattaaaaacaaagtgccttatcttgcactggagttcaagtgctcttttgttagttattcactgattgtacttgtggatggttgagcacaaaaaaccacctctacatttctcttaaaggtaggttggcaacgttctttttctaccacaggatactccttttcattttgtacagtatggaggtatctattccattggcactgaagggtctaggtagtttagttcctttctgatataaccctttttttttcttttttttttttttttaaagacagagtctcactctgtcacccaggctggagtgcagtggcatgatctcggctcactgcaacctctgcctcccggttcaaatgattctcgtgccttggtgtcccgagtagctgggattacaggttcccccccaccttcccccacacccagctaatttttgtgtttttagtagagacggggtttcaccatgttggccaggctggtctcaaactcctgacctcgtgatccacctgcctcggcctcccaaagtgctggggttacaagcatgagccaccacacctggcctattatgacctttttcatttttctctgagctacacattatttagatatttcccctagagattagaaacctcctttcatcctgtccactttttgttagcatactttcattggatttactggtacatgttttgtgatcatgataatgtgatcttgttttggtggtgtccccctactccgtctctatgccatgacagccttctgccccaaagcctggaagattactctttggtcaagggcatacaaatagaaagttaataaaggggaatggtgttgaaatagaacctcatacatttattacagttctacttatacagaaaatctagacaccttcatccttctcacagctctgttttttagtagagtagtctttagagtagtcttcactgttatctatatacctagaaagttaactgggagctttgactcttactgtgccttcactcatagtgtgccttcttagctgctggagaatttggggagaggatgtacacagcactggtgcctcagccctgccaaggtcttcactgtatatattttgtgtgttcttctgaaactcttgatttcttatatggcaataaactcagcatgtattaaaaaaaaaaaaaaaa

SEQ ID NO: 103 - DNA, 3995 bp, Homo sapiens
cgctctctgctcgcgcttgggctcgcgatggggaagaagtcccgggcggtacccggccgtaggcccatcctgcaactctctccgccgggtcctcggggcagcacgccgggccgggacccggagccggaacccgacactgagccggactcaaccgcggcggtccccagccagcccgccccgtcggcggcgacgaccaccgcggtgactgccgccgcggcctcggacgactcgccttcagaagatgaacaggaagcggtgcaggaggttcctagagttgttcagaatcctccaaaaccagtcatgaccactagacccacagctgttaaagcaacaggcggtctatgcttgcttggtgcttatgctgacagtgatgacgatgacaatgatgtttccgaaaaactagcacaatccaaagagacaaatggaaaccagtcaactgatattgatagtacattggccaacttcctagcggagatcgatgccataacagctcctcagcctgcagctcctgtaggagcttctgctccacctccaactccacctcgaccagagccaaaggaagcagcaacatctaccctttcttcttctacttcaaatggaacagactccacccaaacatctggttggcaatatgatactcagtgttcactggcaggagtcggaattgagatgggcgattggcaggaagtctgggatgagaacacgggatgttattattattggaatacacaaacaaatgaagtgacttgggagttaccccaatatcttgccacacaggtacagggattacagcattaccagcccagttctgtgccaggtgctgaaactagttttgtggtaaatacagacatatattctaaggagaaaacgatttctgtttccagtagtaaaagtggaccagtcatagccaagcgagaagttaaaaaggaagtaaatgaaggaattcaggctctctcaaatagtgaggaggagaagaaaggggtggcagcatcgctgcttgctcctttattgcctgagggaataaaagaagaagaagagagatggagaagaaaagtaatttgtaaagaggagccagtttcagaagtaaaagaaacaagtacaacagtagaagaagcaacaacaatagtaaagccacaggaaattatgttggacaatatagaagacccttctcaggaggatctttgcagtgttgtccaatctggagaaagtgaggaggaagaggaacaagatacccttgaactggagctagttttggaaaggaaaaaagcagagttgcgagccttggaggaaggagatggtagtgtgtcagggtctagtccacgttctgatatcagccagccagcatctcaagatggaatgcgtaggcttatgtctaaaagaggaaaatggaagatgtttgttcgagctaccagtccagaatctaccagtaggagttctagtaaaactggacgagatactccagaaaatggagaaactgcaattggtgctgaaaattcagaaaaaatagatgagaattcagataaagagatggaagtagaagaatctccagagaaaataaaagtacagacaacaccaaaagtagaagaagaacaggatttgaaatttcagattggagaactggcaaataccctgacaagtaaattcgagtttctaggcattaatagacaatccatctccaactttcatgtgctgctcttacagactgagactcgaattgcagactggcgggaaggggctcttaatggaaactaccttaaacgaaaacttcaggatgcagcagaacaactaaaacagtatgaaataaacgccactcctaaaggctggtcctgccactgggacagggatcatagacggtatttctatgtaaacgaacagtcgggcgagtctcagtgggagtttccagatggtgaagaggaagaagaagaaagccaagcacaagaaaatagagatgagactcttgccaaacagaccttgaaagacaaaactggcactgattcaaattcaacagaatcctctgaaacttccacaggttctctttgtaaagaatccttttctggtcaagtttcttcttcatcactcatgccacttactccattctggaccctccttcagtcaaatgttcctgtgcttcaacctccattacccttggaaatgccaccacccccacctccacctccagaatcacctccaccccctcctccaccacctcctcctgcggaagatggtgagatccaggaggtagagatggaggatgagggaagtgaggagccccctgccccaggaacagaggaagatacccctttgaaaccttcagcacaaaccacagttgtaactagccagagttcagttgattccaccatctctagttcttcttccactaaaggaataaagaggaaagctacagaaattagcactgcagtggttcagaggtcagctaccattggcagttctccagttctctatagccagtcagctatagctacaggtcaccaggcagcagggattggaaaccaggcaacaggaattggacatcagacaataccagttagccttccagcagcaggaatgggtcatcaggccagaggaatgagcctgcagtcaaattaccttggactagcggcagcacctgcaattatgagttatgcagaatgttctgtcccaattggagtgactgctccctcattgcagccagttcaggcccgaggtgctgtgcctaccgctaccattatagaaccaccaccaccacctcctcctcctcctcctccaccaccaccagctcccaaaatgccaccacctgaaaagacaaaaaaaggaaggaaagacaaggcaaagaagagtaagaccaaaatgccatctttggtaaaaaagtggcagagtatccagcgtgagttagatgaagaggacaattctagttccagtgaagaggatcgggaatcaactgcacagaagcgaattgaagagtggaaacagcagcagctggttagtggcatggcagagagaaatgctaattttgaagcccttcctgaggattggagagcaaggctgaagagaaggaaaatggctccaaacacatagtttttaagtttttaaaacttttttgtattattgtttgttttgtgttcagttcaaagtcttaaccagttttattgtcaaataaactataaatgttatgggggagatcttataaatttcctgggcaagagtgtatgcatacaaagttttcacttttgtgaaatgtaatttttctgtttttgcaaagggatgaggtgattggaattgctttgaccatgctgcctttattctcaaactggcaaacttagcatgttaggtgtattaacctcatcagtcttgaagaacatgtggctcatgagtataacacttctgtagaggactccctgacaaaagtgaagaattaacttctcctccagaacaagtgcaattcagaaggcagctctgcattctaccttgcttgactggaattgtctgaagctttttctggcctcttttctctagtcggccacccctgaagtgctgaggtctaagtggtttacctcgtgctgatagatggccacactctttagagtagttctcataagttctagaactggtagctcggtcgtttcgcacactaggtggcatacaggcagcagcaggtgttcatatccttgattttgagaatttcccctcaagtatgtggcagtaaatacaacaagacactctatgtattaatgtctccattgtcttaaccctgttccaaaacaaaattcacctcctttctttatgtgaatgtattctccataaaattccagtatttaaaaagcagtttactgttctgtactttctgttgtatcacaatcaggtaaaagtcactttaaactgaggaaacggcaaattgtgttttaaagctctttgtatttctccagtttctgaccttgtaaatttgtatatatgcactaataaagctttttttataatcctgaaaaaaaaaaaaaaaa

SEQ ID NO: 104 - DNA, 7940 bp, Homo sapiens
tcaagatggcggccaaggtggcgaagcagcagccgcggcggcggcggcggctggagtgagcgtccgactcgccgcgccgaacgaggtcccggtgtagggccgcgcgccgtggccgcgtcccactcctcaggccggggcgcacgtcggctcccacgcttagccagctcccggtggtttcctagaaacatgattgtttattggcattgatctcacagtctggtgaggacttctttactgataatgtcaagttcaggttatcctcccaaccaaggagcattcagcacagaacaaagtcgttatcctcctcactctgtccagtatacatttcccaacacccgccaccagcaggagttcgcagtccctgattatcgttcctctcatcttgaagtgagtcaggcatcacagcttttgcagcaacagcagcagcaacagcttcgaaggcgaccttccttgctttcagaatttcacccaggttctgacaggcctcaagaaaggagaactagttatgaaccgtttcatccaggcccatccccagtggatcatgattcactggaatcgaagcgaccacgtctggaacaggtttctgattctcattttcagcgtgtcagtgctgcggttttgcctttagtgcacccgctgccagaagggctgagggcttctgcagatgctaagaaggatccagcattcggaggcaaacatgaagctccatcctctccaatttcggggcaaccatgtggagatgatcaaaatgcttcaccttcaaaactctcaaaggaagagttaatacagagtatggatcgtgtagatcgagaaattgcaaaagtagaacagcagatccttaaactgaaaaagaaacaacaacagcttgaagaagaggcagctaaacctcctgagcctgagaagcccgtgtcccctcctcctgtggagcagaaacaccgcagtattgtccaaattatttatgatgagaatcggaaaaaagcagaagaagctcataaaatttttgaaggtcttggcccaaaagttgaactgccactgtataaccagccatcagataccaaggtgtaccatgagaacatcaagacaaaccaggtgatgaggaaaaaactcattttattttttaaaagaagaaatcatgcaagaaaacaaagggaacaaaaaatctgccagcgttatgatcagctcatggaggcatgggagaaaaaagtggacagaatagaaaataatcctcggaggaaagctaaagaaagcaaaacaagggaatactatgaaaagcagtttccagaaattcgaaaacaaagagaacagcaagaaagatttcagcgagttgggcagaggggagctggtctttcagccaccattgctaggagtgagcatgagatttctgaaattattgatgggctctctgagcaggagaataatgagaaacaaatgcggcagctctctgtgattccacctatgatgtttgatgcagaacaaagacgagtcaagttcattaacatgaatgggcttatggaggaccctatgaaagtgtataaagataggcagtttatgaatgtttggactgaccatgaaaaggagatctttaaggacaagtttatccagcatccaaaaaactttggactaattgcatcatacttggagaggaagagtgttcctgattgtgttttgtattactatttaaccaagaaaaatgagaattataaagccctcgtcagaaggaattatgggaaacgcagaggcagaaaccagcaaattgctcgaccctcgcaagaagaaaaagtagaagaaaaagaagaggataaagcagaaaaaacagaaaaaaaagaagaagaaaagaaagatgaagaggaaaaagatgaaaaagaagactccaaagaaaataccaaggaaaaggacaagatagatggtacagcagaagaaactgaggaaagagagcaagccacaccccgggggcgaaagactgccaacagtcagggccgccgtaagggccggatcaccaggtccatgacaaacgaagctgcagctgccagtgctgcagccgcagcggctactgaagagcccccaccacctctgccaccgccaccagaacccatttctacagagcctgtggagacctctcgatggacagaagaagaaatggaagttgctaaaaaaggtctagtagaacatggtcgtaactgggcagcaattgctaaaatggtgggaacgaaaagtgaagctcaatgtaaaaacttctattttaactataaaaggcgacacaatcttgacaacctcttacagcagcataaacagaaaacttcacgaaaacctcgtgaagagcgagatgtgtctcaatgtgaaagtgtcgcttccactgtttctgctcaggaggatgaagatattgaagcctccaatgaagaagaaaatccagaagacagcgaagttgaagctgtcaagcccagcgaggacagtcctgaaaatgctacttctcgaggaaacacagaacctgcggttgagcttgagcccaccacggaaactgcacccagtacatctccctccttagcagttccaagtacaaaaccagctgaagatgaaagtgtggagacccaggtgaatgacagcatcagtgctgagacagcagagcagatggatgtagatcagcaggagcacagtgctgaagagggttctgtttgtgatcccccacccgctaccaaagctgactctgtggacgttgaagtgagggtgccagaaaaccatgcatctaaagttgaaggtgataataccaaagaaagagacttggatagagccagtgagaaggtggaacctagagatgaagatttggtggtagctcagcaaataaatgcccaaaggcccgagccccagtcagacaatgattccagtgccacgtgcagcgctgatgaggatgtggatggagagccagagaggcagagaatgtttcctatggactcaaagccttcactgttaaaccccactggatctatactcgtctcatctccgttaaaaccaaatccactggatctgccacagcttcagcatcgagctgctgttatcccaccaatggtatcctgcaccccatgtaacataccaattggaaccccagtgagcggctatgctctctaccagcgacacattaaagcaatgcatgagtcagcactcctggaggagcagcggcagagacaagaacagatagatttggaatgtagaagttctacaagtccatgtggcacatccaagagtccaaacagagagtgggaagtccttcagcctgctccacatcaagtgataactaatctccctgaaggcgttcggcttccgacaactcgaccaaccaggccaccgccccctctcatcccgtcatccaaaaccacagtggcttcagaaaaaccatcttttataatgggaggctccatctcacagggaacaccaggcacttatttgacttctcataatcaggcttcctacactcaagaaacacccaagccgtcagtgggatctatctctcttggactgccacggcaacaggaatctgccaaatcagctactttgccctacatcaagcaggaagaattttctccccgaagccaaaactcacaacctgagggtctgttggtcagggcccaacatgaaggtgtagtcagaggtaccgcaggagccatacaagaaggaagtataactcggggaactccaaccagcaaaatttcagtggagagcattccatccctacggggctctatcactcagggcaccccggctctgccccagactggcataccaacagaggctttggtgaaggggtccatttcgagaatgcccattgaagacagcagtcctgagaaaggcagagaggaagctgcatccaaaggccatgttatttatgaaggcaaaagtggacatatcttgtcatatgataatattaagaatgcccgagaagggactaggagtccaagaacagctcatgaaatcagtttaaagagaagctatgaatcagtggaaggaaatataaagcaagggatgtcaatgagggagtctcctgtatcagcaccgttagaggggctgatatgccgagcattacccagggggagtcctcattctgacctcaaagaaaggactgtattgtctggctccataatgcaggggacaccaagagcaacaactgaaagctttgaagatggccttaaatatcccaaacaaattaaaagggaaagtcctcccatacgagcatttgaaggtgccattaccaaaggaaaaccatatgatggcatcaccaccatcaaagaaatggggcgttccattcatgagattccaaggcaagatattttaactcaggaaagtcggaaaactccagaagtggtccagagcacacggccgataattgagggttccatttcccagggcacaccaataaagtttgacaacaactcaggtcaatctgccatcaaacacaatgtcaaatccttaatcacggggcctagcaaactatcccgtggaatgcctccgctggaaattgtgccagagaacataaaagtggtagaacggggaaaatatgaggatgtgaaagcaggcgagaccgtgcgttcccggcacacgtcagtggtaagctctggcccctccgttcttaggtccacactgcatgaagctcccaaagcacaactgagccctgggatttatgatgacaccagtgcacggaggacccctgtgagttatcaaaacaccatgtccagaggctcacccatgatgaacagaacttctgatgttacaatttcttctaacaagtctaccaatcatgaaaggaaatcgacactgacccctacccagagggaaagtatcccagcgaagtctccagtgcctggggtggaccctgtcgtgagccacagtccgtttgatccccatcacagaggcagcactgcaggcgaggtttatcggagccacctgcccacgcacttggatccagccatgccttttcacagggctttggatcctgcagcggctgcttacctgtttcagagacagctttcaccaactccaggttacccaagtcagtatcagctttacgcaatggagaacacaagacagacaatcttaaatgattacattacctcacaacagatgcaagtgaacttgcgtccagatgtggccagaggactctccccaagagagcagccactgggtctcccatacccagcaacgagaggaatcattgacctgaccaatatgcctccaacaattttagtgcctcatccagggggaacaagcactcctcccatggacagaatcacttatattcctggtacacagattactttccctcccaggccgtacaactctgcttccatgtctccaggacacccaacacaccttgcagctgctgcaagtgctgagagggaacgggaacgggagcgggagaaggagcgggagcgggaacggattgctgcagcttcctccgacctctacctgcggccaggctcagaacagcctggccgacctggcagtcatggatatgttcgctccccttccccttcagtaagaactcaggagaccatgttgcaacagagacccagtgttttccaaggaaccaatggaaccagtgtaatcacacctttggatccaactgctcagctacgaatcatgccactgcctgctgggggcccttcaataagccaaggcctgccagcctcccgttacaacactgctgcggatgccctggctgctcttgtggatgctgcagcttctgcaccccagatggatgtgtccaaaacaaaagagagtaagcatgaagctgccaggttagaagaaaatttgagaagcaggtcagcagcagttagtgaacagcagcagctagagcagaaaaccctggaggtggagaagagatctgttcagtgtttatacacttcttcagcctttccaagtggcaagccccagcctcattcttcagtagtttattctgaggctgggaaagataaagggcctcctccaaaatccagatatgaggaagagctaaggaccagagggaagactaccattactgcagctaacttcatagacgtgatcatcacccggcaaattgcctcggacaaggatgcgagggaacgtggctctcaaagttcagactcttctagtagcttatcttctcacaggtatgaaacacctagcgatgctattgaggtgataagtcctgccagctcacctgcgccaccccaggagaaactgcagacctatcagccagaggttgttaaggcaaatcaagcggaaaatgatcctaccagacaatatgaaggaccattacatcactatcgaccacagcaggaatcaccatctccccaacaacagctgcccccttcttcacaggcagagggaatggggcaagtgcccaggacccatcggctgatcacacttgctgatcacatctgtcaaattatcacacaagattttgctagaaatcaagtttcctcgcagactccccagcagcctcctacttctacattccagaactcaccttctgctttggtatctacacctgtgaggactaaaacatcaaaccgttacagcccagaatcccaggctcagtctgtccatcatcaaagaccaggttcaagggtctctccagaaaatcttgtggacaaatccaggggaagtaggcctggaaaatccccagagaggagtcacgtctcttcggagccctacgagcccatctccccaccccaggttccggttgtgcatgagaaacaggacagcttgctgctcttgtctcagaggggcgcagagcctgcagagcagaggaatgatgcccgctcaccagggagtataagctacttgccttcattcttcaccaagcttgaaaatacatcacccatggttaaatcaaagaagcaggagatttttcgtaagttgaactcctctggtggaggtgactctgatatggcagctgctcagccaggaactgagatctttaatctgccagcagttactacgtcaggctcagttagctctagaggccattcttttgctgatcctgccagtaatcttgggctggaagacattatcaggaaggctctcatgggaagctttgatgacaaagttgaggatcatggagttgtcatgtcccagcctatgggagtagtgcctggtactgccaacacctcagttgtgaccagtggtgagacacgaagagaggaaggggacccatcacctcattcaggaggagtttgcaaaccaaagctgatcagcaagtcaaacagcaggaaatctaagtctcctatacctgggcaaggctacttaggaacggaacggccctcttcagtctcctctgtacattcagaaggggattaccataggcagacgccagggtgggcctgggaagacaggccctcttcaacaggctcaactcagtttccttataaccctctgactatgcggatgctcagcagtactccaccaacaccgattgcatgtgctccctctgcggtgaaccaagcagctcctcaccaacagaacaggatctgggagcgagagcctgccccactgctctcagcacagtacgagaccctgtcggatagtgatgactgaactgcacaaagtgaggggaacagggtgcaggagagggatctctagtttttgtggtttaatttttagtagcaggtcaaaaacctgccctcctgtgacttattccctgagacttttcaggagagccagcccacagatgatgaagaaatgatggaagttcatttggagagtcaaatgggaaaaaaacaaacaaaaaactgcctttgatacaggcaattcagtggactataataatagtggagggttgagatgtagagtttttaaaaagtgaacagttgctgttcttacatctgtaaagaaaaccataatgtctttaaatcactcttctgtaaatagatgacctttttgcagtgtaaaaaaaaaaaaaaaaaaaaaaaaaa

SEQ ID NO: 105 - DNA, 12568 bp, Homo sapiens
cttccagctcccgccgggcggctgtgacggccgcagcgggtcgcagagcagggagtggacacggagtggggagcggagagggaaggaggaggaggaggagcaaaggtgttggagagaaaacttcagaaaggaacaggaaacctgccggggaggcggcggcggctgcggcttctctgggcgcctgggctgcgctcttcgcggggtgtccgcagctgcggcttggccccggtctggcttccccggcgcgcacgcacggctgagccgcgacgctcagtggctcgggccgtgccctccgccgcggctcttggccgctgtagtcccgcgatccgatccgcttctgccgcggcggctccctggagagagggcggcgagggcgcagggaagaagagggacgtccactgtggaacatgaagcagcatgactgagaaaatgtccagcttcctctacataggggacatcgtgtccctgtacgcggagggctcggtcaacggcttcatcagcaccttggggttagtggatgacagatgtgtggtgcacccagaggccggggaccttgccaaccctcccaagaagttcagagactgccttttcaaggtgtgccctatgaacagatattctgcccagaagcaatattggaaagcaaagcaagccaaacaagggaaccacaccgaggcagccttgctgaagaaactacagcacgctgcagaactggaacaaaaacaaaatgaatcggagaataagaaactgttgggagaaattgtaaaatacagtaatgttatacaactactgcatataaaaagcaacaaatatcttactgtcaacaagagattacctgctttactggagaagaatgccatgcgtgtgtccttggatgctgcaggaaatgaagggtcttggttttatattcatccgttctggaaactgagaagcgagggtgacaatattgttgtaggagataaagttgttttgatgcctgtgaatgcagggcagccactacatgccagcaacatagagcttcttgataacccagggtgtaaagaggtgaatgctgtcaattgcaacaccagctggaaaatcactttattcatgaaatatagttcctatcgagaggatgtattaaaaggaggggacgttgttagattatttcatgcggaacaagagaagtttttgacttgtgatgaatatgagaaaaaacagcacattttccttcgtacgaccttgcgccaatcagctacttctgctactagttctaaagcactctgggaaatagaggtggttcatcatgacccatgccgtgggggtgcaggacagtggaacagcttgttcagatttaagcatcttgcaactggaaactatttagctgcagagcttaatcctgattatcgagatgcccaaaatgaaggaaaaaatgtgagagatggagtccctccaacttcaaagaaaaaacgccaggcaggggagaagatcatgtatactttggtttcagtcccgcatggcaatgacattgcatccctttttgaactagatgccacaactcttcagagagctgactgcctggttccaaggaactcatatgttcggttaaggcatttatgcaccaacacatgggtaaccagtactagtatccccatagacacagatgaagagaggcctgttatgttaaagattggaacctgccaaaccaaagaagataaagaagcgttcgcaatcgtgtctgttccactgtctgaagttcgagacttagactttgccaatgatgccaataaagtactagcgaccacagttaaaaagctagaaaacggcacaataactcagaatgaaaggaggtttgtaaccaaattattggaagatctcatattctttgttgctgatgtgcctaataatggacaagaagttctggatgtggttatcactaagccaaaccgagagcgtcaaaaattgatgagggaacaaaacatactggcacaggtatttggaattcttaaagcaccctttaaagagaaagcaggagaaggctcgatgctgagacttgaagatctgggggatcaaagatatgcaccctacaagtacatgctgcggctctgttaccgcgtcctgagacactcgcagcaggattaccggaaaaatcaggaatatattgctaagaatttctgtgtcatgcagtcccagattggctatgatattttggcagaagatactatcacagctttgttgcacaacaacagaaaactactagagaaacatatcacagcaaaagaaatagaaacatttgtcagtttactcaggagaaatcgggagccaaggtttttggattatttgtcagatctgtgtgtgtctaataccactgctatccctgtaactcaagaactcatctgtaaatttatgttgagtccaggcaatgcagacattctcattcaaactaaggtggtctcaatgcaagcagacaaccccatggagagctccatcctttcagatgacattgatgatgaagaagtttggctctattggattgacagcaacaaggaacctcatggcaaagctatcaggcaccttgctcaagaggcaaaagaaggcaccaaagctgacttagaagttcttacctattacaggtaccagctaaacctctttgcaaggatgtgcttggatcgccagtatctggccataaaccagatttctacacagctgtctgtagacctgatcctgcggtgtgtgtcggatgagagcctgccgttcgacctccgagcgtccttctgtcgcctcatgctccacatgcacgttgaccgggatccccaggagtccgtggtgcctgttcgctatgccaggctctggacagaaatccccacaaagatcacaattcatgaatatgattctataacagactcttccagaaatgatatgaagaggaaatttgccctgacaatggaatttgttgaagaatatttgaaagaagttgtaaaccagccctttccttttggggataaagaaaaaaataaactgacatttgaggtggtccacttggctcggaatcttatatactttggattttatagtttcagtgagttattaaggctaacaagaacacttctggctattttagacattgtacaggcccccatgtcatcatactttgaaagattaagcaaatttcaagatggaggaaacaatgtgatgagaaccattcatggggtgggagagatgatgacccagatggtactcagtagaggctccatcttccccatgagcgtgccggatgtgccacccagcatccacccgagcaagcaagggagccccaccgagcacgaggatgtgactgtgatggacaccaagctgaagatcattgagattttgcagtttatcctgagtgtcagactggattataggatctcatatatgctgtcaatatataagaaggagtttggagaggacaatgacaatgcggagacatctgccagtggatctccagacactttactaccatcagctattgttcctgatatagatgaaattgcagctcaggcagaaactatgtttgcgggaagaaaagaaaaaaatccagttcaacttgacgatgaaggaggcaggacgtttttacgggtcctcattcatctgatcatgcacgactacccgcctttgctgtctggagccctgcagctgttgtttaagcacttcagccagagggcagaggttttacaggcatttaagcaggtgcaattactggtgtctaatcaagacgtagataactacaagcaaatcaaggcagatctagaccagcttcgactgacagtagaaaagtctgagctatgggtggagaagagcagcaactatgagaatggagaaataggggaaagtcaagtgaaaggtggtgaagagccaattgaggaatcaaacattttaagtccagtgcaggatggaacaaagaaacctcagattgacagcaacaagagcaataactaccggattgtaaaggagattttgatcaggctaagtaaactctgtgtgcagaataaaaagtgtcggaatcaacatcaacgattactgaaaaatatgggggcgcattcggtggtgttggatcttctgcagataccctatgaaaagaatgatgaaaagatgaatgaagtaatgaatctagcccatacatttctgcagaatttctgtcgaggaaatccacagaatcaagttcttcttcataaacatctgaatttgtttttaactccaggtctccttgaagcagaaaccatgcggcacatcttcatgaacaattaccatctgtgcaacgaaattagcgagagagttgtacaacactttgtgcactgcattgagacacatggccgccacgtggagtacctgaggtttttgcaaacaattgtaaaagcagatggtaaatatgtgaagaaatgccaggatatggtaatgacagagttgataaatgggggtgaagacgtgctgatattttacaatgatagagcatcatttccaatccttctccatatgatgtgttcagagagagaccgaggggatgagagtggccccttagcctaccacatcaccctggtggagttgctggcagcatgcacagaggggaaaaatgtctacactgaaatcaagtgtaattcccttctcccgctggacgacatagtgagggtggtgacccatgacgactgcatccctgaggttaaaattgcttatgtgaactttgttaatcactgttatgttgacactgaagtggaaatgaaagaaatctatacaagtaaccacatttggaaattatttgagaacttcttggtggatatggcaagggtttgcaacacaactacagacaggaaacatgcagacatctttttggaaaagtgtgttactgagtcaataatgaatattgtgagcggcttctttaattctcccttttcagacaatagtaccagcctccagacacatcagccagtttttattcagctactgcaatctgccttcagaatttacaattgcacctggccaaacccagcgcagaaagcctcagtggaatcctgtatcagaactttggctgaagtggcaaaaaatcgtggaattgccattccagtggatttggacagccaagttaatactcttttcatgaagagccattcaaatatggtgcagagagcagcaatgggttggagactatcagctcgctctgggccacgctttaaggaagctcttggagggcctgcttgggattacagaaatattattgaaaagttacaggatgtagtggcctccttggagcaccagttcagcccaatgatgcaggctgaattctcagtgttggttgatgtattgtacagtccagaactgctgttccctgagggaagcgatgcaagaataagatgtggcgctttcatgtcgaagttgattaatcatacaaagaaactaatggagaaagaagaaaaactgtgcattaaaattcttcagacattacgagaaatgttagagaagaaagacagctttgtggaagagggtaacacattaagaaagatacttctgaatcgatactttaaaggtgattatagtattggtgtgaatggacacctatcaggagcctactccaaaactgcacaggtgggaggaagcttttctggacaagattcagataagatggggatatcaatgtcagacattcagtgtctgctggataaagaaggtgcatcagaacttgtcatcgatgttatagtgaacaccaaaaatgacagaattttttcagaaggcattttcctcggcattgccttgcttgaaggaggaaatacacaaacacagtattctttctaccagcagttgcatgaacaaaaaaagtcagaaaaattctttaaagttctctatgatcgaatgaaggctgctcagaaagaaataagatcaacagtgacagttaataccatagatttaggtaacaaaaaaagggacgatgacaatgaattgatgacatctggtccacgaatgagagtaagagattcaacactacatttaaaagagggaatgaaagggcaattaacagaagcttcttcagcaacatccaaagcatattgtgtatacagaagagaaatggatccagaaatagacattatgtgcacaggaccagaagcgggaaacactgaggaaaaatccgcagaggaagtaacaatgagtcccgcaattgccatcatgcagccaatactgagatttcttcagttactgtgtgagaatcacaaccgggaattgcagaacttcttgaggaatcaaaacaacaaaacaaattacaacctagtctgtgagacccttcagtttctggactgcatttgtggaagtacaaccggtggcctgggcctgttgggtctctacatcaatgagaagaatgtagcgctggtcaaccagaacctggagagcttgactgagtattgccagggcccttgccatgaaaatcagacctgtatcgctacacatgagtctaatgggattgatatcatcattgctttgattctgaatgacataaaccctcttggtaaataccgaatggacctggtgctccagctaaagaacaatgcatctaaacttttgctggccattatggaaagcagacatgacagtgagaatgcagaaagaattctttttaacatgagacccagagaactggtggatgtgatgaagaatgcctataaccaaggattggaatgtgaccatggggatgatgagggtggagatgatggtgtttctccaaaagatgttggacacaatatctatattctggcccatcagttggcccgccacaataaactgttgcagcagatgctcaaaccaggatcggatccagatgaaggagatgaagccttaaagtattatgccaaccacactgcacagattgagattgtccggcatgataggaccatggaacaaatagtttttcctgtccccaatatatgtgaatacctcactcgagaatccaagtgccgtgtgttcaatacaactgaaagggatgaacaaggaagtaaagtgaatgactttttccagcaaacagaagatctctacaatgaaatgaagtggcagaagaaaatcaggaataaccctgcactgttctggttctcgaggcacatctctctctgggggagcatttccttcaacctggctgtgttcatcaatttagctgttgctctcttctacccatttggggatgatggagatgaaggtacactttctccattgttctcggttcttctttggatagcagttgcgatctgcacatctatgctgtttttcttctccaagcctgtgggtattcggccgtttcttgtatcaataatgctcagatcaatatatacaataggtcttgggcctacattaatacttcttggtgcagctaatctttgtaataaaattgtttttctggtgagttttgttggaaatcgtggcacgttcacccgtgggtaccgagcagtcatcctggatatggcctttctctatcacgtggcgtatgtcctggtttgcatgctgggcctttttgtccatgaattcttctatagcttcctgctttttgatttggtgtacagggaagagactttgctgaatgtcataaaaagtgtcacacgaaatggccgctctattattctaactgcagtcctggctctcatcctcgtctacctgttttccattattgggttcctttttttgaaggatgacttcactatggaagttgataggctgaaaaaccgaactcctgttacaggcagtcatcaagtgcctactatgactttaactaccatgatggaagcatgtgccaaggagaactgttcacccacaattccagcttcaaatacagctgatgaagagtatgaagatggaattgaaaggacgtgtgacactctccttatgtgcattgtcaccgtgctgaaccagggcctcaggaatggcggtggtgtgggggatgtgctaagaaggccatcgaaagatgagcccttgtttgctgcccgagtggtttatgaccttcttttttatttcattgttatcattattgttctgaacttgatttttggtgttatcatcgatacttttgctgatctcagaagcgaaaaacagaaaaaagaagaaattctaaagacaacttgtttcatctgtggacttgagagagacaagtttgataataaaacggtttcatttgaggagcacattaagtcagaacacaatatgtggcattatttgtacttcatagtcctggtgaaagttaaagacccaacagaatacactggacctgaaagttatgtggctcaaatgattgtggagaagaatttggattggtttcctcggatgcgagccatgtccctcgttagcaatgaaggcgacagtgagcaaaatgaaattcggagccttcaggagaagttggaatcgaccatgagtctggtcaaacagctgtcgggtcagctggcggagctcaaggagcagatgacagaacaaaggaagaataagcagagactgggcttcctcggatcaaacacaccccatgtgaatcatcacatgccaccacactgataccatggggggaagccgtgactagcctttcatcagtgtcctgcctgatcactgaataaagaactgagatggaggggagtgaacagtgcctattgttgaaaagttaaaaacaaccaagtgccaagatgttgagtgggttagctccgagaacaatttataactgtgttttcatggttgcgaagacctaacctcaaatgcatctgctagaaagcgtacatcacacattcgcaatgcatcaggaagaaaaggcttgcccaaaaggctggagagggcagggagcggcaggatggaaggagacacggggcagggagaactctcttctgctaaatcgataggagtcagttttgtcttaaatgctgactacagccactgacatggttggctggaatttctttcttttaattgtggcatataggtttgtgacacaagaagtcatactttggtggctaagttttactaaggaaaataactgaaaagattaaaagtgagagctgaaaagagaaatgataatgcttccaaactgtagctgtcacagggcaatttctttatttataacatgaagcacaatggatttacagctctaggaacttagtactttggagcttttgcctctcacactgacaacataacaggatgtgattgccttctctgggattcagacaggctctgtcaatgtggagcacaaaaggagattttcatataacttgttaaaaacatgttctaagtcatgtataggctaagattttaagaagatctgggggaataaaaagccaacagtaagccccaggaaagggttttttgagaccatatgtatgctattaaaatatattgagattaatacatgaaaatgcttaaaagtgataggaattattgagaaacttatgatggtggcattgccttttataaacatggagtgaaagccatttgactcaacgtttgctgtgcttaaagaattgcttcaggacccgagcgtttttatgtatgctgttcctgcagttaggaaaaaaaaatccaagaaatgtattgaatactcaagaaaatgccacatttcaattacatatttaaaactgtatctgtaagggcttttcaaaatgtagcaagataaaaatctcttattcaaattgtttttgtattaaatcatgcactcagaatttgtcgagggagagaataacctggtgtgttcaggttattcttagagactacacatttggaatagcagagcaaaatatggataatgaaagtgttgggaaaaaagtgatgtgacagggagtgaagacacttgataccagactctgggagatactctgcaagttgacctggcctctcccccacaggaacaaaacactgcctccagagtctttaaattctcagttatcaacgccaaggtttaaggtctagatagggtttgctatagggtttgctctgacaatttttaaagcttttggattgttctaacatagcttaagctattggttcctaaaaatcccaaatcaagatctatgtagaatataaaggaagcctgaaccaatccttccacatactgttaagatgtagacttggaacaaagctgttgggacccagagcaatgaatttttgaactgaagctactggtactccccagcaccacctcatactaagaattcctcactctgacatgacagtattttttctgaccaggagctgaaagaccctgacattcatgatccaaagatataagaaattttgatatgtctgcatgcagcacagaactttgaacctaggaggcagtcaataaatacatgagaaattcagctgtcattcagttactcttaattctttataaaactttaaatgataccacatatttgtttgtttaaaatggctttcccaaaatcaaagtagactaaagcagccatctttaaaatccaggatcatcaatgctattaacagtatcaggtaaaaagtacactttaaaatattttaatcaggcagagttttatggatagagaatagaagagaaaggtagtaaatattgaacatattccaatataggaacctatctctgttttagtacaaaatatttctgacatctgaactagaggtcaagagaataaattcatttgtatacatctgagcaacctgtctttcagatgataaagtatctagccttttctgacaccataatagttcattttgtagggaataagccattaggtgtatataattgctttctagaaatgacctaatgtccccaaccactttgtagtggcagatcactgtttcacagcatattttctcccaaggaaagtattcaaaagagactgcaactaacaagactcttatttcatcaaaatttaaatatttctgagttgtatttttaatgcctctttcttttctgcctaaatgcttagaaattataaagcaaaaaaaaaaaaaacagcaacaaaaaatcgaagcagacaaaaaaggcacttttcagaacatcaaattcctaatgaagaagaggagaagataatggggaaatttgacatttgatataaatttatatttgttatgtgtatgtttgttaatgcaactggaatatttgacttaggtgagtatcagttaacatccttgtatttatatagtgacatcaaaataaatgcaatcatcttgaactttgatgttaagggagattttgaaaaaatatttagttatttcaaattcatattggttcaaaagtatcagtttctgctgaataatatttttaatttcaaaagggttttgttccctctgtgctccattctgaggctcaagagcttaatgccagtatgttttctgagttaaaataacacttttagatgagaaaatgcttgtatcatacagggctataatataaataaataaattgtatgtatgcaaaatttatcatattttctaccccttaaaaaattaagttagaaataagcttattttcttgcacatcaatatttttctgttggtaaagaggacacaatttctagtagattgttaataacatcaggaagatatttctttcgtcagaactaattgtgtgcttattcccatattctcagctcataactccctgttttggctgctctctttattttacaattgtttcattgcaaacagcaaggcagtatagcccacactcagccactagcccccagtccccaggactgagaatgagtggggaggctggggagttggtgagagaaggtggagatagggatttctgcttcccagtactctatcattagagaaaaggaggggtaaatattagctaagaagaagaaaaaagcttattcttcagggacccagtagattggacgtaagcaagtaaatattgcacaggcatcatgatgtaatagttgatggaccccagagatacccctcacccatgcagagaacaaagctgtgtggaagagcaactaccataagatggtgtgttccttccagcggctgttaaagccatcctgaataacaaatcagctattcctacctacagacccattccaatatgctgtgatacacgacacggtgcaccgcagaggagacagacatcttcagcacaaacacagatgcctgcaggagcttggcaagtcactaaattgcatgaaattgtgaggtgcacaccaaatgcagggatgggggaggccgtgggaagctctgtattctcaaaatttgacagctaattccggtttttagaaaatgcctgaggccagtagaggccctctagtcactcactgctgctgtttctgatataattattgagaaagctatctcacttaatagaagaaaacacgcactatcaaaaccagatagcctaacgtgcatgtgaaaatcgagaaagctgaaaacaaatccaggtacccttctctgaactggagtgtttccacagacttgaataatttatgaaattatcacaccagtatttctcatatcaccaagaagactttctctcctgcagtagaggattgttatatttgcctaaaaaacacgattccaatatatgacaagggcagataatttataagtgaatgttaataaaattggatgtgtataa

SEQ ID NO: 106 - DNA, 3178 bp, Homo sapiens
cacctctaacccaggctcagagtagctgctgtttctgagagaacgattcgtaggacagcccctgacgccattcccttttgcccttctttctgcgggcctttccggtacttgagcggtgtccagagcgtggccagttctcgtctatctggctgcctttagggagcggtgcctagcgttggccaatagttggctgtcgaaagtgccggcccccgcgccggcgcctgcagcagccgggtgggaaggctcaagatggcgtgcttgttggagaccccaatccgcatgagcgtcctttcggaccaggaatgaaagttactgggagataacttcgaaggattttgcaacaaattcgagctgtccgactctgagaatggaagtaacagctagcagtcgccactatgttgacaggctatttgaccctgatccccagaaagttctacaaggtgtcatagacatgaaaaatgctgtaattggaaacaacaagcagaaagccaatctcattgttttaggagctgttccaagattgttgtacttgcttcagcaagaaacctcaagcacagagctgaaaactgaatgtgcagtggtgttgggaagtcttgctatgggtactgaaaacaatgtcaagtctctactggactgccatattatccctgccttattgcaaggactactgtccccagacctgaagtttattgaagcttgcctccgatgcctgcgtaccatcttcaccagtcctgtcactccagaggagctactgtatacagatgccacagtgataccacacctcatggcactgcttagcaggtcccgctatacccaggagtacatctgtcagatcttctcacactgctgtaaagggccagatcatcaaacaattttatttaaccacggtgcagttcagaatattgctcacctactaacctcactgtcctacaaagttcgaatgcaagcactgaaatgtttctcagttttagcttttgaaaacccccaggtatcgatgaccctggtaaatgttttggttgatggagaattgttaccacagatttttgtgaagatgttacagagggataagcctattgagatgcagctcacatcagcaaaatgtttaacttacatgtgtagagctggagcaattcggacagatgataactgtattgtattaaagacattaccttgtttggttcgaatgtgcagtaaggagagattactagaggagagagttgaaggagctgagacacttgcctatctgattgaaccagatgttgagctacagagaatcgctagcataactgatcacctcattgccatgcttgctgattatttcaagtatcccagctcagtgagtgccatcactgatattaaaaggcttgatcatgatttaaaacatgctcacgaactccgccaggctgcattcaagctctatgcctctcttggagcaaatgatgaagacatccggaagaaggtgagtctgggagaggggcgtcccccagtcctgacagccagcaggcagggagtgacgtcaacctgaaagtcgtggtgaagagcactaacagtgactgtttgaatataataaagcagagtgactaaaggcataattgaagaatgaatgggacccggatttggggggttgtttgtttgtttttagaacatagagtggcatggccgtgctggaatgacaaataactggcgtgctttttttttgtgtcattaatatgaattattatgttgcacatttttgcatgtgttctgataaaaatcaattctagcactgtgaagcttcagacaccttgaaagtcctaacattagaattgtaaatgttatttatggaaataccttccaatgctattgagaaattcaaatctctattgtatattgttctttgatatgtggcttagttttatgttttgattttttttgctactgtgcaagtttaatgtgaataaaatctttgtggaatgatgattttatgtttagtgagtggtcatctgaattttccagctccccagaaaatgtatgcactggtatagcacccttatgttactaaagcctagtctaacactgaactcatgttcttgatgagaatacttctagatgaggagtatagtggtaagtaagctctgacttggctccttccacaaaccaaaaagctggaacttaccactcaaaaacatgtataacctaataaattctacacaaggctttcaagaccatcagagagcaaaaccacatgttctgtcttgaggagccatagcagaaagagcaaattagtcattatttactgaacatgatgatttactaaatctctccatctgcattagtattttaaggagcactgtgagagaaatcacaaagtattagagtttaccatgattcagagaagttcttcaggcctgtagaaagaggagtatggaacaaccttacatttgttgaaataacttgaaaaggaaccatttcttgaagaaactgaagtaatagcaataagatttgatgtgtgagtagctttgatttaaaatcaatgcaaaaagcacaactaataaattgaatgtttccatgtacctcactttatttcagttaacaagatactttgacttgaagtgtttttagtgtatccctatgaaaatcatttttggtacatctaagttttcacttataaactgttatttcaaagcaaacatactagtgatatatatatgatttatggatgttgacgccaatgttcagtttgggtacgttggtgtattgcaaggggagaggcttttataacaatagatttgaacatttttaaaaaattggactgtgtaacttaaatacacaattatttggtttaggatggttattagggcccattagaaacaggagaagtattttacccattcttaaagctctaaaaaaccatctcatggactgaaaggtagatagacagatggaccacaatgggaaataggatgtccatttgtacttctttgtacttttttgttaataaactgttttggaattaatggcttaatttgtgatatcatgttctagaaatacctgcaacatgacagtctaatcagtagtctattaaaacttgtattcataatgtgtataatttcctggtaaggctaactcctgatcgtttctgtagaaagatgacaaataaagaaaaagttataattattaattaaaaaaaaaaaaaaaa

SEQ ID NO: 107 - DNA, 2796 bp, Homo sapiens
gcggggctggcacccgggccgaggctctgattctggggggaggccgactccaccctggctggaggaactgggtgctcctgcccgctggcccctcgcgcgtgaggatctatctcaggctaagaaatggcatttcaaaaggcagtgaaagggacgattcttgttggaggaggtgctcttgcaactgttttaggactttctcagtttgctcattacagaaggaaacaaatgaacctggcctatgttaaagcagcagactgcatttcagaaccagttaacagggagcctccttccagagaagctcagctactgactttgcaaaacacatctgaatttgatatccttgttattggaggaggagcaacaggaagtggctgtgcgctagatgctgtcaccagaggactaaaaacagcccttgtagaaagagatgatttctcatcagggaccagcagcagaagcactaaattgatccatggtggtgtgagatatctgcagaaggccatcatgaagttggatattgagcagtataggatggtaaaagaagcccttcatgagcgtgccaacctgctagaaattgctccccatttatcagctccattgcctataatgcttccagtttacaagtggtggcagttaccttactactgggtaggaatcaagctgtatgatttggttgcaggaagcaattgcctaaaaagcagttatgtcctcagcaaatcaagagcccttgaacatttcccaatgctccagaaggacaaactggtaggagcaattgtctactatgacggacaacataacgatgcacggatgaaccttgccattgctctgactgctgccaggtatggggctgccacagccaattacatggaggtagtgagcttgctcaagaagacagacccccagacagggaaagtgcatgtgagcggcgcacggtgcaaggatgtcctcacagggcaggaatttgacgtgagagccaaatgtgttatcaatgccacgggacctttcacggactctgtgcgcaaaatggatgataaagacgcagcagctatctgccagccaagtgctggtgtccatattgtgatgcctggttattacagcccagagagcatgggacttcttgacccagcgaccagtgatgggcgagttattttcttcttaccctggcaaaagatgacgatcgctggcactactgatactccaactgatgttacacaccatccaattccttcagaagaagatatcaacttcattttgaatgaagtgcgtaattacctgagttgtgatgttgaagtgagaagaggggatgtcctggcagcatggagtggaatccgtcctcttgttacagaccccaaatctgcagatactcagtctatctcccgaaatcatgttgttgatatcagtgagagtggccttattactatagcaggtggaaagtggacaacttatcggtctatggcagaagataccataaatgctgctgtcaaaactcataatttaaaagcaggaccaagtagaacagttgggcttttccttcaagggggtaaagattggagccccacactctacattaggcttgtgcaggattatggacttgaaagcgaggtggcacagcatcttgccgccacctatggtgataaggcctttgaggtggccaaaatggcaagtgtgactggcaaaaggtggcctattgttggagtacatcttgtgtcagaatttccatatattgaagcagaggtgaaatatgggattaaggagtatgcctgcactgctgtggatatgatttcacgtcgtactcgcctggcctttctaaatgtccaggcagcagaggaagccctacccaggattgttgaactgatgggcagggaactgaattgggatgattataagaagcaggaacaacttgaaacagccaggaagtttctatattatgaaatgggctataaatctcgatcagaacagttaacagatcgctctgaaattagcctactgccttcagacattgacaggtataagaagagatttcataagtttgatgcagaccagaaaggctttattaccattgttgatgttcagcgtgtattagagagtatcaatgtccaaatggatgaaaatacactccatgaaattctaaatgaagttgatttgaataaaaatggacaggttgaactcaatgaatttttgcagctgatgagtgctattcaaaaaggaagggtatctggaagccggcttgctatactaatgaaaactgcagaagagaacctcgacagaagagttccaattccagtggaccgtagttgtggaggattgtgagtctgggcagtaaatccacagccaacaaacatagaaacgacaaatcaccatgtaacaaccagagatgactgaaaccactctgaaataatgaatgtggatagctgccttttttaacactagaaaacattccaaaactttaaggtgttggtgtatttgccagctttatttgctgtactttatttgtatttgccattcagtctagcttttaagtatatttttttctttttctcattttcaatgcacattagttttgcatctgttttgtgacctgttagatgtgacacattctctttttgtttattcccttattctaaatgagttctaaaaacataatattttggcaaaaattgaaaaaagctggagacattttgtgacatgcatacagatagcatgtgttattaaaaagagttgcctattgaaatgatcgtgtttctggagaaattaagcttatagacagcatgtgttattaaaaagagttacctattgaaa

SEQ ID NO: 108 - DNA, 7283 bp, Homo sapiens
agtgcatacagttcctgctcctggtgtctactctgaagagcacagagtagacgtttgtctgccatttcaccggcagtaagatcagcagctgctggtgagcaaagaggtagtagtgggtcactggactggtgggcgccggggccgcgcgctagatggagaggtcagcggcgaacccagctccatggcctagtctcgtcagaccgagcgcggaccctgccggcctccgttctcttccgcttgtctcagatatcatctcttcttttgatcactgttcctgattgtgacattgtgcaagtgttaaattgtgtgccttttgttcctgaagaaagaggtcctgggatctttgaaatgctaagattcttggataccacagtatcataaaattcctctaaatgcattggtgctagcaatcccctactctgtctggcctctggatctagcttgaagttctggattcatttccttcttccttgtacctcagcctgagccttctgtcacccaaagggctccagctggtttttcactcaggcctcactttatcttccaagatgaaggaactgagacacagaggttgagacttgtctaaagtaacatgaccagtaagtgcttgaattaatgcagatgaggaaactgaggtccagagaagttgaagttttcccaaggtcacacagcagagctggaactagagcttgcatttcctgacttccagattagtgttatttttacttcaaactattacttcttggtgagttattgtgggaaaaatcctgtatattgaagatgtctctacacagtatcgtttcctgtttaaattacagataacttcaagagttttcagaaaaaaagaaattgggacttttttggttaaatcatgccatctgaacagaaacagttattttgtgatgaaaaacaaactactttaaaaaaagattatgatgtgaaaaatgagatagttgataggtcggcacctaaaccaaaaatttcaggaagtattcattatgcactaaaaaatgtgaaaattgatttgccaaaaataaatattccaaatgaagtcctattgaaacatgaagttgacaaatacagaaaattatttcagagtaaacagcagactgcaagaaaatctatcagtataaagactgtaagctgtgtagaggagtgtacattgcttcataagtctgagagagctgaagaagagggtgtaaaaatgtctgcaaaaatactcaatttcagctgtttaaaatgccgagacaacactcgatatagcccaaatgatttgcagaaacactttcaaatgtggcaccatggcgaattaccttcatatccttgtgaaatgtgcaacttttcagcaaatgactttcaggtatttaaacaacacagacgaacccatagaagcactttagtaaaatgtgacatttgtaacaatgagagtgtatatactttactgaacttgacaaagcatttcacatccacacattgtgttaatggtaattttcaatgtgaaaagtgtaagttctccacccaggatgttggcacatttgttcagcacattcatagacataatgaaattcattataagtgtggtaaatgtcatcatgtatgttttaccaaaggagagcttcagaagcaccttcatattcattctggtacttttcccttcacttgtcaatattgtagctatggtgccaccaggagagaacaccttgtaagacatgttataactttgcacaaagaacatttatatgcaaaagaaaaactggaaaaagacaaatatgaaaaaagaatggcaaagacttctgcaggacttaagctaatactgaaaagatataaaataggtgcatcaaggaagacgttctggaaacgtaagaaaattaacagtggaagtgacagaagtatagaaaagaacactcaagtgcttaagaaaatgaacaaaacacagactaaatctgaagaccagagccatgttgttcaagagcatttaagtgaagaaaaggatgaaagactacactgtgagaataatgataaagcccctgaatcagagtcagagaagccaactcctctgtccactgggcaaggtaatagagctgaagagggaccaaacgctagttcaggtttcatgaagactgctgtactaggacctacactgaaaaatgtaatgatgaaaaataataaactagcagtttcccctaactataatgctacgtttatgggcttcaagatgatggatggaaaacagcatattgtattaaaattggtgcctatcaaacaaaatgtatgttcaccaggctcacagtcaggtgctgcaaaggacggtactgctaatttgcagccccagactttggacactaatggatttttaacaggagtaacaactgagttaaatgacacagtttatatgaaagcagctactccattttcatgttcatcttctatactttcagggaaagcaagttcagaaaaagaaatgactttgatatctcaaaggaataatatgcttcaaacaatggattatgagaaaagtgtatcttctttgtcagcaacatcagaattggttacagcatcagtgaatttgaccacaaaatttgaaacaagagataatgttgacttctggggaaatcatctcactcagagtcaccccgaggtattaggtaccaccattaaaagtccagataaagtcaactgtgttgccaaaccaaatgcatacaacagtggagatatgcataattattgcattaattatggcaactgtgagttacctgttgaatcctccaaccaaggatcattaccttttcataattactcaaaagtgaataattctaataaacgtcgtaggttttcaggaacagcagtgtatgaaaaccctcaaagagaatcttcatccagcaaaacagttgtccaacaaccaattagtgaatcatttttatcactagtgaggcaggagagctcaaaaccagatagcctattagcatctattagccttttaaatgataaagatggaactttaaaagcaaaatctgaaattgaagaacagtatgttttagaaaaaggacaaaacattgatggacaaaacctgtacagtaatgaaaatcaaaatttagagtgtgcgactgaaaaatctaaatgggaagacttttctaatgtcgattcacctatgatgcctagaatcacatctgttttctctctccagagccaacaggcatcagaatttctgccacctgaagtaaaccaattgcttcaggatgtattgaaaataaaacctgatgtaaaacaagactctagtaacactccaaataaaggcttgccacttcattgtgaccagtcatttcaaaaacacgagagagaaggcaaaattgttgaatcttcgaaagatttcaaagtgcaaggcatcttcccagttccacctggcagtgtgggtattaatgtgcctacaaatgatttgaatttgaaatttggaaaagaaaaacaagtgtcatcaataccacaagatgtgagagattcagagaagatgcctagaatttcaggttttggcacattacttaagactcagtcagatgcgataataacacagcagcttgtaaaagacaaactacgagccaccacacaaaatttaggttctttttatatgcagagtccacttttaaattcagaacaaaaaaaaactataattgttcagacttcaaaaggattcttaataccattgaacattactaacaagcctgggctaccagttattcctggaaatgcacttccattggttaattcacaaggtatccctgcttctctttttgtaaacaagaaacctgggatggttttaacacttaataatgggaaacttgaaggtgtttccgctgtcaaaaccgagggtgccccagctcgtggaactgtgactaaggagccttgcaaaacacctattttgaaggtagaaccaaacaataattgtcttacacctggactttgttccagcattggcagttgtttgagcatgaaaagtagctcagaaaatactttgccattaaaaggcccttacattttgaaaccaacgagttctgtgaaagctgttcttattcctaacatgctatctgagcaacagagcactaagttgaatatctccgattcagtaaaacagcagaatgagatttttccaaaaccacctctttataccttcttgcctgatggcaaacaagctgtttttttaaagtgtgtgatgccaaataaaactgagctgcttaagcccaaattagtccaaaatagtacttatcaaaatatacagccaaagaaacctgaaggaacaccacaaagaatattgctgaaaatttttaaccctgttttaaatgtgactgctgctaataatctgtcagtaagcaactctgcatcctcattgcaaaaagacaacgtaccatctaatcagattataggaggagagcagaaagagccagaatctagagatgccttacccttcttactagatgacttaatgccagcaaatgaaattgtgataacttctactgcaacatgcccagaatcttctgaggaaccaatatgtgtcagtgactgttcagagtccagggtattaaggtgtaaaacaaattgtagaattgagaggaacttcaatagaaaaaagacttccaaaaaaattttttcaaaaacaaaaactcatggaagtaaagactctgaaactgcctttgtatctagaaacagaaactgtaaacgaaagtgtagggatagttaccaagaacctccaagaagaaaagcaacattgcatagaaagtgtaaagaaaaggcaaaacctgaagatgtccgtgaaacatttggatttagcagacctaggctttcaaaagattccatcagaactttgcggcttttcccttttagttctaaacagcttgtgaaatgtcctaggagaaaccaaccagttgtagttttgaatcatcctgacgcagatgcaccagaagtagtaagtgtaatgaaaactattgctaaatttaatggacatgtacttaaggtttcattgtcaaaaagaactataaatgctttactgaaaccagtttgttataaccctcctaaaacaacttatgatgatttttccaagaggcacaaaacatttaaacctgttagttctgtgaaagaaagatttgtgctaaaattaacactcaaaaagacaagcaaaaacaattaccagattgtgaagactacctctgaaaatattttgaaggctaaatttaactgttggttttgtggtagagtatttgacaatcaggatacttgggctggtcatgggcagagacatttaatggaagctactcgggattggaacatgttagaatagtttaccataattaccaaggaaaagaaaagtaaaattaccttagaagaaaacaacgggttcagttaccataatgcagacattttctacttcagtatagtacctgaaatcgaacattttaaaagttgattgtatttctgtggaagagtaaaagttgtatgtatgatatttgaaaatgctatccctgcactcaaaagttttgaaagaaactaatcacagcacagaagtaccttgatttaattttttaaacgtgttctcgggaagttagggctaaagaaaattttgataaaacaattttcccactttagttctttagtgactcttagtagagggtaatggctgacacccccattccctctcttcttccaccagccttatgcatctaagtgtagctcctctggagatggagagctctttcatcgtagaactgaaggagtttctcacatttgtgaagatactttgagagaacctgggtaaagaagtcactctatatctgctaaatatagttattttgaaggatattaggctccttgaaagtacatttaactcactacagttacacctcatacaatgcttgaagagtttttggcaagtaaattttttttccagttgaactctgtcacttgttagagattgggaacactctcccaaggtgattttctttttctaagtgactgtgtcaaatgttgcagtagatgggcagcttcaagagaagaatttaaactctttgtctcattgaaagtttggttaaagaacttgaacatatttctaaatttgattatattctctgatgatccctttgcacagaactatgcttatctcatgtttgtcctccataaacaaatggccatttttttcttcttggttcccatccctttaaaaagagtggaacataggagcacttccaagggagtggcttttcttgaaaattaaaattgtttaccaaaacagtattttgaagcaagatcatatttttgtctgtattcactttattatttgaacatgtccaaattaggacaaagcatttctgttagctgcttctcagtgtgactgacaacccaaaacatatatacagattgttggcatttgcaaaaggaagcatcaatagtggacccagaggcagtgcataaaaccttaggatagattcctaagggacatgcccaacagagttttaaaatggatgttttcatgatgacaacagaatcatagatttagatttttcaccttgtaagtttggatcaaattttgctggttctttggataatggagttcttgtgttaacaaattacgtgctatatgattttttgttacattgttacaagtgttaatgacattttcattaatggatgaaaacttcagggcttcttttctgtatataacaaattaagtctgtacatatttttgtaccttttatgtaaattttgcacagaaatttttggcataagtttattttctttcagtttagttcagtgcatgcactaataaaactggttgtttaatttaaaaggaatatataagactttacccatgttattttcttggtttttatttcagatgtagattttgtttttgaggtaaattcgttcttcagggattgaacactattgttagcaagtgcctaaaaaagatgtgaaacagtttacatatgtcaactgtaacagtaggtcccaaatgggcccattcccctaatagttttatttttaaagaaagccatacatagaatgcttcaagctatcttgctatgcacattatacttgtactgttttgtgcagtttgtctactttcttagtgaagtattttttgtataaaatgttacaattgtgtttcttaaattgagcctaagaatggagttaattggaaatatacagtatatattaataatgtacatggtgtttaaagaatggtaagcattgttaatttctgtaatgaacattttcaattaaatttatcttgtttgtgttta

SEQ ID NO: 109 - DNA, 1691 bp, Homo sapiens
agtccaataaaaacctcatcagttaccaactaaatcagggcatggtgtttttttgttgttttctttttaaagcatagttttagtaatatatttactaaaaaccttagacattatgaaaaaagtcaggatttggaatcttacactgcttggctaaattgacacaatatagaccaacagtttcatcctggggcttatgggtctcataggagcacccgtatgctgaagaaaggcaaagagagaactacagaatttgtagaaaagttttgttgtagttgcttctgaacaattagtttttgtttgttttgttttgttttgtttttctggtaacctagcagtcaaagctcacatttttggacaatgactcattcttcccaggacactggttcttgtggcattcaggaagatggaaagctttatgtggtggattccataaatgacttaaacaaactaaacctctgtccagccggatcgcagcatctgttccctctagaggacaaaatcccagtccttggcacaaactcaggaaatggaagccggagtctgttttttgtggggctgctaattgtgctgattgtcagcctggcactggtttttttcgtgatatttctaatagttcaaactggaaacaagatggatgatgtgtcaagaagactaacagctgaaggaaaagacatagatgatcttaagagaatcaataacatgatcgtaaagcgactcaaccaactcaaccaactggactctgaacaaaactaaaggactgattttctgaaagcacctgctaacaccttgagctttttactttcctgggagtgtacagggttaggaactgagaaagtgcacttcctcaggcaacagatgatctggtcaggcaacccacccctggggcccactttctgcagcaagatgggagcaattccaaggcaagtgggtatgggaatagcaactaaaaaggggtgaacttgtctcagcccccttttatggtagggcacttcaactttaatggggtgggcggctagcagggaggagaatcaacaaagcaagagaacttgactatgtacgtccaacttcttacagaaggagctttgctaccagaacaagttcactgtgtcaatgaagttcatgacacctcatgcacctttacagatatctgggaaagcctgagaaattcattgagttttatgtattgaagggaaccaggtgattactcttttcaataagagggattctgctcaggtgattagactttgactctatttccccagggacagtgatgggtgggccccagagctagttgctgtctggtgtttgctggtgaaaacatgagcagtagttatgtggggctgagagtcaaaagggaaagcctaattaattcaactaatgtttattaagctcctactctgtgcaaatcactctactcaagaggagctcacataagagtgcaggataaagaaaggagatggacagttatatgtaattatataaactttgtgtattttgtttctcatgaaaaaacccctttggcaccctgctgattgatttggaagaaatctgatagatttgtggcctttcctaaattgcactaggaaattatgtagttagaatatttggaacctgcattagttccagcaatgaaagtaagacacacagcatatgacataagacacagtgtgaaataaatgagtttaaaaagc

SEQ ID NO: 110 - DNA, 3161 bp, Homo sapiens
agcgaccgcagccggggggacgcgggaggatggagcaagtggagatcctgaggaaattcatccagagggtccaggccatgaagagtcctgaccacaatggggaggacaacttcgcccgggacttcatgcggttaagaagattgtctaccaaatatagaacagaaaagatatatcccacagccactggagaaaaagaagaaaatgttaaaaagaacagatacaaggacatactgccatttgatcacagccgagttaaattgacattaaagactccttcacaagattcagactatatcaatgcaaattttataaagggcgtctatgggccaaaagcatatgtagcaactcaaggacctttagcaaatacagtaatagatttttggaggatgatatgggagtataatgttgtgatcattgtaatggcctgccgagaatttgagatgggaaggaaaaaatgtgagcgctattggcctttgtatggagaagaccccataacgtttgcaccatttaaaatttcttgtgaggatgaacaagcaagaacagactacttcatcaggacactcttacttgaatttcaaaatgaatctcgtaggctgtatcagtttcattatgtgaactggccagaccatgatgttccttcatcatttgattctattctggacatgataagcttaatgaggaaatatcaagaacatgaagatgttcctatttgtattcattgcagtgcaggctgtggaagaacaggtgccatttgtgccatagattatacgtggaatttactaaaagctgggaaaataccagaggaatttaatgtatttaatttaatacaagaaatgagaacacaaaggcattctgcagtacaaacaaaggagcaatatgaacttgttcatagagctattgcccaactgtttgaaaaacagctacaactatatgaaattcatggagctcagaaaattgctgatggagtgaatgaaattaacactgaaaacatgatcagctccatagagcctgaaaaacaagattctcctcctccaaaaccaccaaggacccgcagttgccttgttgaaggggatgctaaagaagaaatactgcagccaccggaacctcatccagtgccacccatcttgacaccttctcccccttcagcttttccaacagtcactactgtgtggcaggacaatgatagataccatccaaagccagtgttgcatatggtttcatcagaacaacattcagcagacctcaacagaaactatagtaaatcaacagaacttccagggaaaaatgaatcaacaattgaacagatagataaaaaattggaacgaaatttaagttttgagattaagaaggtccctctccaagagggaccaaaaagttttgatgggaacacacttttgaataggggacatgcaattaaaattaaatctgcttcaccttgtatagctgataaaatctctaagccacaggaattaagttcagatctaaatgtcggtgatacttcccagaattcttgtgtggactgcagtgtaacacaatcaaacaaagtttcagttactccaccagaagaatcccagaattcagacacacctccaaggccagaccgcttgcctcttgatgagaaaggacatgtaacgtggtcatttcatggacctgaaaatgccatacccatacctgatttatctgaaggcaattcctcagatatcaactatcaaactaggaaaactgtgagtttaacaccaagtcctacaacacaagttgaaacacctgatcttgtggatcatgataacacttcaccactcttcagaacacccctcagttttactaatccacttcactctgatgactcagactcagatgaaagaaactctgatggtgctgtgacccagaataaaactaatatttcaacagcaagtgccacagtttctgctgccactagtactgaaagcatttctactaggaaagtattgccaatgtccattgctagacataatatagcaggaacaacacattcaggtgctgaaaaagatgttgatgttagtgaagattcacctcctcccctacctgaaagaactcctgaatcgtttgtgttagcaagtgaacataatacacctgtaagatcggaatggagtgaacttcaaagtcaggaacgatctgaacaaaaaaagtctgaaggcttgataacctctgaaaatgagaaatgtgatcatccagcgggaggtattcactatgaaatgtgcatagaatgtccacctactttcagtgacaagagagaacaaatatcagaaaatccaacagaagccacagatattggttttggtaatcgatgtggaaaacccaaaggaccaagagatccaccttcagaatggacatgattcagggagctagaagacactttaagttatactggaaaattcaggtgccactgaaagccagatttatagtattccatctttaatatgtgggactaacagcagtgtagattgttaccttaatattttttgctgggaccatctacctgccttatactacacttaggaaaaagtattacatatggtttattttgaaacttcaagtattattgccttaatgtctcttaaccctgttacacgctgcttgtagacatgttaatatagtaatacctttatgatatattgagtttaaggactactctttttctgttttatcatgtatgcattattttgtatatgtacagggcaagtaggtatataatttgataaagttgcaattgaaatattattaacagaagatgtaagaaatttctgcatggtctaaatctttgtgtactttatttgtaaattatttgccctggagttttagaaaatagtttctgaattttaaacttgctggattcatgcagccagctttgcaggttatcagagatcaaagattgtaataataattttgtaaattgtaagcaaaaagttatttttatattatatacagtctaattgttcatcctaattgttcctgttttcatctagtcagagattcagtaagtgccttggaacaatattgaattctcttagcttgtgtgtgtttctttaatatttgaactcaagtgggattagaagactatcaaaatacatgtatgtttcaggatatttgacctgtcattaaaaaaaacaaacagttttacagtg

SEQ ID NO: 111 - DNA, 3577 bp, Homo sapiens
ctccagggggctcaggagcaccctctgagaacccgctgtgcacccaccttttcccctcttttggtgggcaagtaagcacgggggaaaagcatccggtggcctcagggagccctgaagaaaccgaagcagaatgtaccagggacacatgcagaaaagtaaagaacaaggatatggaaaactaagcagtgatgaagacctcgaaataattgttgatcaaaagcagggaaaaggctctagggcggcagataaggctgttgccatggtgatgaaggagataccgagggaggagtctgctgaagaaaagcccctccttactatgacatcacagctggtgaatgagcaacaagaaagcagacccctcctgagtccctccatcgatgactttctctgtgaaaccaaatcggaagcaatagcaaggccagtaacatccaatacagctgtattgaccactggcttagatctcctcgacctgagtgaaccagtctctcaaacccaaaccaaagccaagaagtcagagccctcatcaaaaacctcatccctcaagaaaaaggccgatggatctgacctcatcagcacggatgctgagcagagaggccagcctctcagagtcccggagacttcatccttagatctagacattcaaacacaactggaaaaatgggacgatgttaagtttcatggagatcgaaataccaagggacatccaatggcagagagaaaatcatcctcatctagaactggatcaaaagagctcttatggtcctcagaacacagatctcaaccagaactgagtggtggaaaaagcgccctcaactctgagtcggcttcagaattggaattagtggctccgactcaggctcgactgaccaaagaacatcgctggggaagcgcattactttctagaaaccactccttagaagaagagtttgaaagggcaaaagcagcagtggagtcagatacagagttttgggataagatgcaagcagaatgggaagaaatggctcggaggaactggatatctgagaaccaagaagcccagaaccaagtaaccatctcggctagtgagaagggatattactttcacactgaaaaccccttcaaggactggcctggagcatttgaagaaggcttaaaaaggctgaaggaaggggatctgccagtcaccatcctgttcatggaagcagcaattcttcaggaccctggagatgcagaggcatggcagttcctcgggataacccaggcggagaatgaaaatgaacaagcagctattgtcgccctccagaggtgcttagaattacagcccaacaacttaaaagctttgatggccttggctgtgagttatactaacactggccatcagcaggatgcctgtgacgctctgaagaattggattaagcaaaatccaaagtacaaataccttgtgaaaagcaagaagggatctccaggcctcacccggcggatgtctaagtccccagttgatagctctgttctggaaggggtgaaggaattatatctggaagctgcccaccaaaatggagatatgatcgacccagacctgcagacaggtctaggggttctgttccacctgagtggagaatttaatagagcaatagatgcatttaacgctgccttaactgttcggccagaggactattcactatggaaccgcctcggggcgaccttggcgaacggagaccgcagcgaggaagccgtggaggcctatacgcgagcactggagattcagccaggattcatccggtccagatacaacctaggaataagctgcatcaacctgggcgcctacagagaagcggtcagcaattttctcactgccctcagtttgcaaagaaagagcaggaatcagcagcaagttcctcatcctgcaatctctgggaatatctgggctgccctcagaattgcgctctctctgatggaccaaccagaactcttccaggcggctaatcttggtgacctggatgtcctcttaagagctttcaacttggatccttgaagaaagaataataccagtactaataatccctgatctgtgtgattgtactgaaaaatcaaaaactattttattatgaatttcaaaaggataaatcaaatattcaaaaggccatggtcatatagcccaaggaaattaattcctgtggacaatgcccagtctctgttcagatccaaaagcacaaaatgttgtatatagagtcaaagtcaggctcaaaagaagaattaagagactcaagacaaaccaagataaagtaactgtgtgttgaatactctttccacaagttgcaagcatattgcaacacatgttctttgggttttttgtctccccttgcagctgatgacacatctgaggaacttgttcatgggaaacatggaaaaagcactgcctcagattgggaaattctgactgtttctgaactgtcttcttttgcaagactgaacatagtttgggccattggtgcatgcacatatattaacttgtgactaaagacagacattgcttaaacctgttccaattttaacttttactgtagccctttgattccagagagggagctttgctggcaaaagcagtttttgcactagaaatttttgctgttcccaatctaaacttttctggtattgtatatatgcactttaatatcttatttatgccttgctggagttttgttttgttgctccaatttttaacttgggggtgaaagatttaagaactcagcctcactagatcaacggaccaaataaacaattcctgaagacagtttttcatagtgtaggattttgaagaagtgtttttcttaaagcagatacgatgacataaggcgtaaatatggcaaacagatcttttcattcacgtgctttctgggtctgtatgaacataagtaagacacaaggtactgtctcttcatgcattctctgcaggaagaaagtttgatggtatcgtgatttctattgagttcaaattaacttgcttaagtgtcatactttactggctttgccctgcacaccaatattccttttaaaccataaatattttaaataatatttcttaagagtgataaataacattttttcctaaaaattatgttttcttagtttcataataatctgcactgttcatccccttgcattctaagtgatagaagagcaacactttcaaaccaaatctcactgaatgccagtgatttcatatgaaagatgcatgcctctttggctctttgaacatttagcaagtattgggaattttctattagcagtggtgttttaattggttgaattccacttagttctccacagtgttttgtatgtgtttggggcttggtgattattttgaaagatacattttttaaagaattaggaacattttttgcaaaatgctaatcagaatataattttcccaatgtcaggtatagaagttatcccattcttctttacctggtctccttccttcgtctagaaccttccccacagtagctaatcctaacaactttttatttatgttctttgataataatagctcatcccgctcatgattatagctacccacaaaaaataaaacaacaacaac

SEQ ID NO: 112 - DNA, 1980 bp, Homo sapiens
cacggaactccctgggtaggagtttgaagctttcttaactcagaaagaaacttccaacacagtttcccaaagaaaaatgggcaccaagggcaaagttattaaatgcaaagcagccatcgcctgggaagcaggcaagcccctttgcattgaagaggttgaagtagctccccccaaggctcatgaagttcgcattcagatcattgctacctccctgtgccatactgatgccactgttatcgattctaaatttgagggcctagctttcccagtgatcgttggccatgaggctgcaggtattgtggaaagtattgggccaggagtgaccaacgtcaaaccaggtgacaaagtaattccactttatgcacctctatgtagaaaatgcaagttttgtctgagtccactcacaaatttgtgtgggaaaatcagtaatctcaaaagtcctgctagtgatcaacaactaatggaagacaaaaccagcaggtttacctgcaaaggaaaaccagtttaccatttctttggaaccagtacattctctcagtacactgtggtgtcagatatcaatcttgccaaaatagatgatgatgcaaatttagagagagtttgtctgcttggatgtgggttttcaactggctatggggctgcaatcaacaatgccaaggtcacccctggttcgacttgtgctgtctttggcctaggaggtgtgggtctttctgctgtaatgggttgtaaagcagcaggagcttccagaatcataggtattgacatcaacagtgagaagtttgtgaaggctaaagccctgggagccactgactgcctcaatcctagagacttacataaaccgatccaggaagttatcattgaattgaccaagggaggtgtggattttgcccttgactgtgcaggtggatctgaaaccatgaaagcagccctggactgtacaaccgcaggctggggatcatgtactttcattggagtagctgctggtagcaaaggattgactatttttccagaggagctaataatcggccgtactataaatggaacattctttggtggttggaaaagtgtagattctatcccaaagctggtcactgactataagaataagaaattcaatctggatgcactggtgacccataccctgccttttgacaaaatcagtgaggcatttgacctaatgaaccaaggaaaaagcgtccgaacaatcctcatcttttgaagatgccaggagcaattcagaatactatctgattgaatgtgaacctgcctggttaatttattacctgatttgatgaaccaaggaaagccatgagtttaaacaaatatttacatttaatatgggaacataaaagagctttaaatattatagactttgtacctgttatatatatgaatattccctatgttaaataataataataactagtgtttatgaatagaatcatatcatctttagaaattgtttaaaattagttctgggaagttgaaagtggggaatgaagagataataaataaaactagattggccatatgtttataatttttttagattgggtaatgaatacatggagtttcattatacttttctctccacttttgtctatgttgaaaattttctgggagctaaatgatgagaacacatggacacatgatggggaacaacacacactggggcctgttgagggcagggagtcggcagagagagagcatcaggaagaatagctaatggatgctgggcttcatacctgggtgatgagatgatctgtgcagcaaagcaccatggtacatgtttacctatgtaacaaacctgcacatcctgcacatgtaccctggaacttaataaaagttggaaatttttaaaaagaatgaataagacctggtatttgatagcacaacagggagactatagtcaacagcaatttaattgtatattttaatatgactaaaagagtataatggattgtttgtaacacaaataaa

SEQ ID NO: 113 - DNA, 10188 bp, Homo sapiens; identical to SEQ ID NO: 39

SEQ ID NO: 114 - DNA, 6751 bp, Homo sapiens
gaatggaaaatggcggcctagacgcggagtttcctgcccgacccgcggcggctccggcggcgccatgacgcgctgggtgcccaccaagcgcgaggagaagtacggcgtggctttttataactatgatgccagaggagcggatgaactttctttacagatcggagacactgtgcacatcttagaaacatatgaagggtggtaccgaggttacacgttacgaaaaaagtctaagaagggtatatttcctgcttcatatattcatcttaaagaagcgatagttgaaggaaaagggcaacatgaaacagtcatcccgggtgacctccccctcatccaggaagtcaccacgacactccgagagtggtccaccatctggaggcagctctacgtgcaagataacagggagatgtttcgaagtgtgcggcacatgatctatgaccttattgaatggcgatcacaaattctttctggaactctgcctcaggatgaactcaaagaactgaagaagaaggtcacagccaaaattgattatggaaacagaattctagatttggacctggtggttagagatgaagatgggaatattttggatccagaattaactagcacgattagtctcttcagagctcatgaaatagcttctaaacaagtggaggaaaggttacaagaggaaaaatctcaaaagcagaacatagatattaacagacaagccaagtttgctgcaaccccttctctggccttgtttgtgaacctcaaaaatgtggtttgtaaaataggagaagatgctgaagtcctcatgtctctatatgaccctgtggagtccaaattcatcagtgagaactacctggttcgctggtccagttcaggattacctaaagacatagacagattacataatttgcgagccgtgtttactgacctcggaagcaaagacctgaaaagggagaaaatcagttttgtctgtcagattgttcgcgtgggtcgcatggagctgagggacaacaacaccaggaaactgacctcggggttgcggcgaccttttggagtggctgtgatggatgtaacagatataataaatggaaaagtagatgatgaagataagcagcatttcattccctttcagccggtggcaggggagaatgacttccttcagactgttataaacaaagtcatcgctgccaaagaagtcaaccacaaggggcagggtttgtgggtaacattgaaattacttcctggagatatccatcagatccgaaaagagtttccgcatttagtggacaggaccacagctgtggctcgaaaaacagggtttccggagataatcatgcctggtgatgttcgaaatgatatctatgtaacattagttcaaggagattttgataaaggaagcaaaacaacagcgaagaacgtggaggtcacggtgtctgtgtacgatgaggatgggaaacgattagagcatgtgattttcccgggtgctggtgatgaagcgatttcagagtacaaatctgtgatttactaccaagtaaagcagccacgctggtttgagactgttaaggtggccattcccatcgaggacgttaaccgcagtcaccttcggtttaccttccgccacaggtcatcacaggactctaaggataaatctgagaaaatatttgcactagcatttgtcaagctgatgagatacgatggtaccaccctgcgagacggagagcacgatcttatcgtctataaggccgaagcaaagaagctggaagatgctgccacgtacttgagtctgccctccacgaaggcagagttggaagaaaagggccactcggccaccggcaagagcatgcagagccttgggagctgcaccattagcaaggactccttccagatctccacgctcgtgtgctccaccaaactgactcagaacgtggaccttctggggctcttgaaatggcgctccaacaccagcctgctgcagcagaacttgaggcagctgatgaaagtcgatggtggtgaagtagtgaagtttcttcaggacacgttggatgccctcttcaacatcatgatggagaactcagagagtgagacttttgacacgttagtctttgatgctctggtatttatcattggactgattgctgatagaaaatttcagcattttaatcctgttttggaaacttacattaagaaacactttagtgcaacgttagcctacacgaagttgacaaaagtgttgaagaactacgtggacggtgctgagaagccgggagtaaatgagcagctgtacaaagccatgaaagcgctagaatccatcttcaagttcatcgtgcgctccaggatcctgttcaatcaactgtatgaaaacaagggagaggctgacttcgtggaatctttgctgcagctcttcaggtccatcaatgacatgatgagcagcatgtcagaccagaccgtccgggtgaagggggcagcactgaaatacttaccaacgatcgtcaacgatgtgaaattggtgtttgatcccaaagagctcagcaaaatgtttactgaattcatcctcaatgttcccatgggcttgctgaccatccagaaactctactgcttgatcgaaatcgtccacagtgacctcttcacacagcatgactgcagagagatcctgcttcccatgatgaccgatcagctcaagtaccatctggagagacaggaggacctggaggcctgctgtcagctgctcagccacatcctggaggtgctgtacaggaaggacgtggggccaacccagaggcacgtccagattatcatggagaaacttctccggaccgtgaaccgaaccgtcatttccatgggacgagattctgaactcattggaaacttcgtggcttgcatgacagctattttacgacaaatggaagattaccattatgcccacttgatcaagacttttgggaaaatgaggactgatgtggtagatttcctaatggaaacattcatcatgtttaagaacctcattggaaagaacgtttaccccttcgactgggtgatcatgaacatggtgcaaaataaagtcttcctgcgagcaattaatcagtatgcagatatgctgaacaaaaaatttctggatcaagccaactttgagctacagctgtggaacaactactttcacctggctgttgctttccttactcaagagtccctgcaactggagaatttttcaagtgccaagagagccaaaatccttaacaagtacggagatatgaggagacagattggctttgaaatcagagacatgtggtacaaccttggtcaacacaagataaagttcattccagaaatggtgggcccaatattagaaatgacattaattcccgagacggagctgcgcaaagccaccatccccatcttctttgatatgatgcagtgtgaattccattcgacccgaagcttccaaatgtttgaaaatgagatcatcaccaagctggatcatgaagtcgaaggaggcagaggagacgaacagtacaaagtgttatttgataaaatccttctggaacactgcaggaagcacaaatacctcgccaaaacaggagaaacttttgtaaaactcgttgtgcgcttaatggaaaggcttttggattatagaaccatcatgcacgacgagaacaaagaaaaccgcatgagctgcaccgtcaatgtgctgaatttctacaaagaaattgaaagagaagaaatgtatataaggtatttgtacaagctctgtgacctgcacaaggagtgtgataactacaccgaagcggcttacaccttgcttctccatgcaaagcttcttaagtggtcggaggatgtgtgtgtggcccacctcacccagcgggacgggtaccaggccaccacgcagggacagctgaaggagcagctctaccaggaaatcatccactacttcgacaaaggcaagatgtgggaggaggccattgccttgggcaaggagctagccgagcagtatgagaacgaaatgtttgattatgagcaactcagcgaattgctgaaaaaacaggctcagttttatgaaaacatcgtcaaagtgatcaggcccaagcctgactattttgctgttggctactacggacaagggttccccacattcctgcggggaaaagttttcatttaccgagggaaagagtatgagcgccgggaagattttgaggctcggctcttaactcagtttccaaacgccgagaaaatgaagacaacatctccaccaggcgacgatattaaaaactctcctggccagtatattcagtgcttcacagtgaagcccaaactcgatctgcctcctaagtttcacaggccagtgtcagagcagattgtaagtttttacagggtgaacgaggtccagcgatttgaatattctcggccaatccggaagggagagaaaaacccagacaatgaatttgcgaatatgtggatcgagagaaccatatatacaactgcatataaattacctggaattttaaggtggtttgaggtcaagtctgttttcatggtggaaatcagccccctggagaatgccattgagaccatgcagctgacgaacgacaagatcaacagcatggtgcagcagcacctggatgaccccagcctgcccatcaacccgctctccatgctcctgaacggcatcgtggacccagctgtcatggggggcttcgcaaactacgaaaaggccttctttacagaccggtacctgcaggagcaccctgaggcccatgaaaagatcgagaagctcaaggacctgattgcttggcagattccttttctggccgaagggatcagaatccatggagacaaagtcacggaggcactgaggccgttccacgagaggatggaggcctgtttcaaacagctgaaggaaaaggtggagaaagagtacggcgtccgaatcatgccctcaagtctggatgatagaagaggcagccgcccccggtccatggtgcggtccttcacgatgccttcctcatcccgccctctgtctgtggcctctgtctcttccctctcatcggacagcaccccttccagaccaggctccgacgggtttgccctggagcctctcctgccaaagaaaatgcactccaggtcccaggacaagctggacaaggatgacctggagaaggagaagaaggacaagaagaaggaaaaaaggaacagcaaacatcaagagatatttgagaaagaatttaaacccaccgacatttccctgcagcagtctgaggctgtgatcctttcggaaacgataagtcccctgcggccccagagaccgaagagccaggtgatgaacgtcattggaagcgaaaggcgcttctcggtgtccccctcgtcaccgtcctcccagcaaacaccccctccagttacaccaagggccaagctcagcttcagcatgcagtcgagcttggagctgaacggcatgacgggggcggacgtggccgatgtcccaccccctctgcctctcaaaggcagcgtggcagattacgggaatttgatggaaaaccaggacttgctgggctcgccaacacctccacctccccctccacaccagaggcatctgccacctccactgcccagcaaaactccgcctcctccccctccaaagacaactcgcaagcagacatcggtggactccgggatcgtgcagtgacgtcgcaagcctctctggaaagagtgtgctgcccctccccatctccatgccctctccttctgtgtcccctgagtctgctgtttacctcattgggcctgtgatgttaacatttcgtgcgactgctttttcttcaaaggagttcagttctcaccatggagtgagtggcctttagcgtcatggagcaaggtgggtctgggaggtagatatgggtccgggatgtgctatcgtagttatcagagttgggggcctctgagtgtgtctggctctgagagagtctgagtcttgcccaaacattctttctttttgtgccaaatgacttgcatttgcaaagagctcaattgctctgagctcagccaagtaggagaggctaggccatcactcttaggaagctgtgtagtgatgatgtataagaatcctcctcactgtcatgggatgttgtatccagcccctccttgttccagccggtggtgtgacttcgttggttgaggtgtgtctccaacctacatcagaccatgaagttcaacccctccagggaagctcctgatttcccctgcataattgaaaataggatatttctcagctattgaacagttactaatttatggggtggaaacagcattaagaatactgaatcaaatggaaaaacaaatgaatacaggaagataagtgttcgttcttttctgaaaaagagtatgtgtaccacaagagctggttttaattgggtgaattgtttttgtcctcattctgtacagaaatttgtatatatgatggttcttagaacttgttttaatttttgtggtccttccgtttattataataggcgtccaccaatgattatccatatgtgttcttaatttttaactgctggaagtgttaaaacacacacacacacacacacacattttttttttgagaactccaaagtcctgaaaattttggtggacaatgatttttaaaaaactaactttgtataacctaatatttgtattctctcatctatatttttttattcactataatcatgatactcttctaatagacttaaaagttaatcattgacaacgaaaaataaaatgttattttaaaaga

SEQ ID NO: 115 - DNA, 7037 bp, Homo sapiens; identical to SEQ ID NO: 12

SEQ ID NO: 116 - DNA, 4369 bp, Homo sapiens
gtcccaggcggttccgctcaacagacgctgctgtggctgcgccgggctgcgacactgcagttgtctacgcggccggggccgggacgaggaggcgttggacggggtcgcatacgttcgtcccctcgcattgcggccccgacagctgcgccaggatccccgggcggcggcgcggggcgtgaacgctctggggctcagccaggcctgcgcgggcccgaggccggaggaacccggactccggcgtagcggttttgacacaagggcgcatatcttcaaagcacctagtacctcctaccattgtcaactgatacagaattcgttgttgggaaggactggggaaacagctgtaacatttgccaccctcagaagctgctggtcctgtgtcacaccaccttagcctcttgatcgaggaagattctcgctgaagtctgttaattctactttttgagtacttatgaataaccacgtgtcttcaaaaccatctaccatgaagctaaaacataccatcaaccctattcttttatattttatacattttctaatatcactttatactattttaacatacattccgttttattttttctccgagtcaagacaagaaaaatcaaaccgaattaaagcaaagcctgtaaattcaaaacctgattctgcatacagatctgttaatagtttggatggtttggcttcagtattataccctggatgtgatactttagataaagtttttacatatgcaaaaaacaaatttaagaacaaaagactcttgggaacacgtgaagttttaaatgaggaagatgaagtacaaccaaatggaaaaatttttaaaaaggttattcttggacagtataattggctttcctatgaagatgtctttgttcgagcctttaattttggaaatggattacagatgttgggtcagaaaccaaagaccaacatcgccatcttctgtgagaccagggccgagtggatgatagctgcacaggcgtgttttatgtataattttcagcttgttacattatatgccactctaggaggtccagccattgttcatgcattaaatgaaacagaggtgaccaacatcattactagtaaagaactcttacaaacaaagttgaaggatatagtttctttggtcccacgcctgcggcacatcatcactgttgatggaaagccaccgacctggtccgagttccccaagggcatcattgtgcataccatggctgcagtggaggccctgggagccaaggccagcatggaaaaccaacctcatagcaaaccattgccctcagatattgcagtaatcatgtacacaagtggatccacaggacttccaaagggagtcatgatctcacatagtaacattattgctggtataactgggatggcagaaaggattccagaactaggagaggaagatgtctacattggatatttgcctctggcccatgttctagaattaagtgctgagcttgtctgtctttctcacggatgccgcattggttactcttcaccacagactttagcagatcagtcttcaaaaattaaaaaaggaagcaaaggggatacatccatgttgaaaccaacactgatggcagcagttccggaaatcatggatcggatctacaaaaatgtcatgaataaagtcagtgaaatgagtagttttcaacgtaatctgtttattctggcctataattacaaaatggaacagatttcaaaaggacgtaatactccactgtgcgacagctttgttttccggaaagttcgaagcttgctagggggaaatattcgtctcctgttgtgtggtggcgctccactttctgcaaccacgcagcgattcatgaacatctgtttctgctgtcctgttggtcagggatacgggctcactgaatctgctggggctggaacaatttccgaagtgtgggactacaatactggcagagtgggagcaccattagtttgctgtgaaatcaaattaaaaaactgggaggaaggtggatactttaatactgataagccacaccccaggggtgaaattcttattgggggccaaagtgtgacaatggggtactacaaaaatgaagcaaaaacaaaagctgatttctttgaagatgaaaatggacaaaggtggctctgtactggggatattggagagtttgaacccgatggatgcttaaagattattgatcgtaaaaaggaccttgtaaaactacaggcaggggaatatgtttctcttgggaaagtagaggcagctttgaagaatcttccactagtagataacatttgtgcatatgcaaacagttatcattcttatgtcattggatttgttgtgccaaatcaaaaggaactaactgaactagctcgaaagaaaggacttaaagggacttgggaggagctgtgtaacagttgtgaaatggaaaatgaggtacttaaagtgctttccgaagctgctatttcagcaagtctggaaaagtttgaaattccagtaaaaattcgtttgagtcctgaaccgtggacccctgaaactggtctggtgacagatgccttcaagctgaaacgcaaagagcttaaaacacattaccaggcggacattgagcgaatgtatggaagaaaataattattctcttctggcatcagtttgctacagtgagctcagatcaaataggaaaatacttgaaatgcatgtctcaagctgcaaggcaaactccattcctcatattaaactattacttctcatgacgtcaccatttttaactgacaggattagtaaaacattaagacagcaaacttgtgtctgtctcttctttcattttccccgccaccaacttactttaccacctatgactgtacttgtcagtatgagaatttttctgaatcatattggggaagcagtgattttaaaacctcaagtttttaaacatgatttatatgttctgtataatgttcagtttgtaactttttaaaagtttggatgtatagagggataaataggaaatataagaattggttatttgggggcttttttacttactgtatttaaaaatacaagggtattgatatgaaattatgtaaatttcaaatgcttatgaatcaaatcattgttgaacaaaagatttgttgctgtgtaattattgtcttgtatgcatttgagagaaataaatatacccatacttatgttttaagaagttgagatcttgtgaatatatgcctgtcagtgtcttctttatatatttattttttattagaaaaaatgaagtttggttggtgatgcatgaaacaaaatagcaagagagggttatagtttaatagtaagggagataacacagcatgtgtagcaccagttgataattggtctctagtagcttactgtcaaaatgttcaatgaagtcttctgttcatctgttgaaactaggaaaatacccaaacttaaatggaagaattctgaaagagaggatagaatttaaagaacaagagtatataaagttattctttgaatatttcgttgactatatgtacattgagttatctatatttgtaaacaaattagtcatggaaaattattctatctcaaagtctccttttagtctagataatcattatttcattttaaaattagtgtttttcctagtttgcactgatgcgtgtatggatgtgtgtgagtcagtggtagcttatttaaaaagcaccttatcctttctcccataacctttgtacactaaaaaatgaaagaatttagaatgtatttgatgatagcattctcactaagacacatgagaatttaactttataaccgcgtgagttaagatttaattcataggttttgatgtcattgttgaagttatttgtaattcagaaaccttgcttgtgtgatacatagtctcttcatttattactgcttgtctgttgttatatctggattatcaaaagcaatagtgcaccaattaagatgtgctcaaatcaggacttaaatcataggcaccacatttttcatgtcagactagttactttgttgattctcagttactgtaggcatcaaaaggcaaaaatcaaaaaaaaaaaaaacaaaaacaaaaaaaaagatgaacctaggtctgtgtaaagtaaggggagtgttaggagcagccaggactgtgtagtgtgtgtttggttgcatcacaaacatcgtatgtggagacattgcaatacagtgttttttgttttcaacttttcttgtattgtatatttgtattatgttttgaatgcttttctcttttcataattaaatattaatgtttgggataactgccaagaagaagtaaaaatattgaatggaacttctatatgaggatgctgtgatctaaaaattaaatctcagtgggcggagaaaaaaaaa

SEQ ID NO: 117 - DNA, 3285 bp, Homo sapiens
aaaaaggacagcgagcggggagccccgaggacccccttttccctgcccagggattgagctccagagcctgttagggagctacccagacaggctttagttcctaaagtgctgaggaaacgcacggggcggtaaaggggaggctcgtcggtgagatggcgccggatctcgcttctcagaggcattcagagagcttccccagcgtgaactctcggccgaatgtaattttgccaggccgcgagggacgcagagaggggctgccaccaggcgggggcacgcgcggtagtcttgtccctacccgcccggtgccgccgtccccggctcccctcgggacgagtccgtacagctggagccgttccggacccggaaggggcggtggcgcagggtcctcgcgcgtcccacgtggggtcccgggcccagcagtctgcgcaccgggctcgctgctgcaccacgcgtcacccacgcagaccatggcagccgccgacggttcgctcttcgacaaccccaggacgttctccagacgtcccccagcccaggcgagtcggcaagcaaaggctacgaaaagaaaataccaagcgtccagtgaggctcccccagcgaaacggaggaacgaaacttcatttctcccagccaagaaaactagtgttaaagaaactcagaggacttttaaggggaacgcacaaaaaatgttttctccaaagaagcattcggttagcacaagtgatagaaaccaggaggagagacagtgcattaagacttcatcactgtttaaaaacaaccctgacattccagaactccacagacctgtggtaaagcaggtgcaagaaaaagtgtttacttcagctgcttttcatgagctgggcctccacccacatttaatttccacaataaatacggtcttaaaaatgtctagtatgaccagtgttcagaagcaaagtattcctgtgttgctggaaggcagagatgctctcgtgagatcccagacgggctcaggtaaaactcttgcctattgcatccctgtggtccagtcccttcaagcaatggagtcaaaaatacagcgcagtgatggcccctatgccctggtgctcgtgccaacgagagagctagctctacaaagctttgacactgtccagaaactgcttaagcctttcacctggattgtgcctggagtgttaatgggaggagagaagagaaaatcagaaaaggccagactccgcaaaggaataaatatccttatctcaactcctggacgcctggtggatcatataaaatccacaaagaacattcattttagtcggctgcggtggttggtgtttgatgaagcagacagaatcttggatttgggttttgaaaaggacatcacagtgatacttaatgctgtaaatgctgaatgccaaaaacgacagaatgtcttgctatcagcgacactcacagaaggtgtaacgcggctagctgatatcagtttgcatgatccagtcagtatttctgtcctggacaagagccatgaccagttgaacccaaaggacaaagcggtccaggaggtctgtcctccaccagctggcgacaagctggacagctttgcaataccagagagtctcaagcagcatgtgactgtggttcccagcaaactgaggcttgtctgcctagcggccttcatccttcagaaatgcaagtttgaggaagaccagaagatggttgtctttttctcaagttgcgagctggtggagttccactacagcctcttcctacagaccctgctgagcagctcaggggcgccggcatcagggcagttgccatctgcctccatgcgattaaaattcctacggctgcatggcggcatggagcaggaggaaagaacagcagtgtttcaggaattttcacattccagaagaggcgtccttctttgcacggatgttgcagctcggggcttagatctccctcaagtcacgtggattgttcagtacaacgctccatcttcacctgcagaatacatccaccggattggaagaaccgcccggattggctgccatgggagcagcctgctcattttggctccttcggaggcagaatatgtcaactcgttggcttctcacaaaatcaacgtttctgagattaagatggaagatattttgtgtgttctgacaagagatgattgttttaaagggaaacgatggggagcccagaaatcccatgctgttggcccccaggaaatccgagagcgagccacagtcttgcagacggtatttgaagattacgtgcactccagtgagaggagggtctcctgggcaaagaaagctctgcagtccttcatccaagcctacgccacctaccccagggagctgaagcacatcttccacgtccgatccctccaccttgggcatgtggcgaagagcttcggactaagagatgcccccaggaatcttagtgccttgactagaaagaagaggaaagcacacgtgaaaaggcctgaccttcataagaagacccagagtaaacacagcctcgctgaaatcctacgttcggaatactcaagcggcatggaggccgacatcgccaaggtcaaaaagcaaaacgcacctggagagcctggtggccggcccctgcagcacagtctgcagccgacaccctgctttggccgtgggaaaacattaaaatggagaaaaacccaaaaaggtgtacagcgggacagcaagacttcccagaaagtttaaaatctctctgggtcttcgagtggaacctggaagccccgggtggcagtggattgatgtccagttcttgtcagaggaggcttgtgaaaaataactgcgcctttgcctgaataccacgtccccaagaatcagaggggccacagcccttctcctccatgggaggccctggagcctgatagaaatcagtggtgtggggcactgtagagactagccagctcccgacggaaggggtctgtgtcttgtattgatcccatcagtgcccggcactcccttcacccaggtgctgacgtgccggggttgagctggcaccccgggatgtgatgtaagaacgccctgcgcgtcagcctggaacgggcttgattgctgcccttaactgtgttctgaagtttcacagcttggcttcagcctatcagcgcatacattggcatgaattttgtgaattagggtgttaaaaactggaattgaatttgtacaaaaagagaatatatttatcactaattattttcttaatgtaggaatgtaccgttaaaaaggaccaaaagtttttggtctgggtcaaaaaatacgaatgtgttctcag

SEQ ID NO: 118 - DNA, 1831 bp, Homo sapiens
ggggaggccagctgggaggggagggggccgtgggggcggctcggcggaaccagccccggctgggcagcagcggggacgccgggggccggggccagggctttccgggcttcggtgaggccgccgtgggccccatcttccggcggtcgccggagtttgtggtgattgttgctgccgccgccaccgccccggctgccatctcctcctcctgggccgccgcctcctcctcttcctcctcctcctgggccgggctgatcccctccccgctgccgcctcctcctgggctgggcccgcggtgtctcgtcccctcgcggagccgctcctgccgccgccgccgccgcctcctcattcatcctcgtgcaccataggcggcacaggcaccaagatgtccaaccgagtggtctgccgagaagccagtcacgccgggagctggtacacagcctcaggaccgcagctgaatgcacagctagaaggttggctttcacaagtacagtctacaaaaagacctgctagagccattattgccccccatgcaggatatacgtactgtgggtcttgtgctgcccatgcttataaacaagtggatccgtctattacccggagaattttcatccttgggccttctcatcatgtgcccctctctcgatgtgcactttccagtgtggatatatataggacacctctgtatgaccttcgtattgaccaaaagatttacggagaactgtggaagacaggaatgtttgaacgcatgtctctgcagacagatgaagatgaacacagtattgaaatgcatttgccttatacagctaaagccatggaaagccataaggatgagtttaccattattcctgtactggttggagctctgagtgagtcaaaagaacaggaattcggaaaactcttcagtaaatatctagcggatcctagtaatctctttgtggtttcttctgatttctgccattggggtcaaaggttccgttacagttactatgatgaatcccagggggagatttatagatccattgaacatctagataaaatgggtatgagtattatagaacaattagaccctgtatcttttagcaattacttgaagaaataccataatactatatgtggaagacatcccattggggtgttattaaatgctatcacagagctccagaagaatggaatgaatatgagtttttcgtttttgaattatgcccagtcgagccagtgtagaaactggcaagacagttcagtgagttatgcagctggagcactcacggtccactgaagctctgaatcctcagggatgccacctgcacattctcatactctgtccggggtcccagcctagcctttaccacgatactggtcctggtttggggggattctgaaacctcaaactaatagaactttcttctctttttttctagtaggtgtagtccttccttaatttcaactcattaaaaaatgctttatagtttagggcagtggaaggaaggctggcatcaaaatattttgatcaaaaaagatgacaatgtaaaggctcagttgtggcagacagttttttgaaagtaacttgtaaagcatttaccatatcctaaatttgcactctttgcagacttgtgcacatatattccgctttcagaatagttttgcaaattgtacacaaacaaacaaaaaggtggaagctttttaataaagaaattgcatttataaatgatctgtattagaatataataaatctccagttatagtcaattactacccatgttgtacaacagataccttctattttagttgctaataaagggctacacaactcaaaaaaaaaaaaaaaaaaaaa

SEQ ID NO: 119 - DNA, 4241 bp, Homo sapiens
cggaagtgttgggcgcagggcgtggctgcggctgcggctgccacgttggaacggaacgtggaggtggccctggccggggaggaggggcggcggcgaatgctgggagagtccgacgagcgctgcactaacgcaggatccggctgccgaaggtcctcgccaggatgaagttaaaggaagtagatcgtacagccatgcaggcatggagccctgcccagaatcaccccatttacctagcaacaggaacatctgctcagcaattggatgcaacatttagtacgaatgcttcccttgagatatttgaattagacctctctgatccatccttggatatgaaatcttgtgccacattctcctcttctcacaggtaccacaagttgatttgggggccttataaaatggattccaaaggagatgtctctggagttctgattgcaggtggtgaaaatggaaatattattctctatgatccttctaaaattatagctggagacaaggaagttgtgattgcccagaatgacaagcatactggcccagtgagagccttggatgtgaacattttccagactaatctggtagcttctggtgctaatgaatctgaaatctacatatgggatctaaataattttgcaaccccaatgacaccaggagccaaaacacagccgccagaagatatcagctgcattgcatggaacagacaagttcagcatattttagcatcagccagtcccagtggccgggccactgtatgggatcttagaaaaaatgagccaatcatcaaagtcagtgaccatagtaacagaatgcattgttctgggttggcatggcatcctgatgttgctactcagatggtccttgcctccgaggatgaccggttaccagtgatccagatgtgggatcttcgatttgcttcctctccacttcgtgtcctggaaaaccatgccagggggattttggcaattgcttggagcatggcagatcctgaattgttactgagctgtggaaaagatgctaagattctctgctccaatccaaacacaggagaggtgttatatgaacttcccaccaacacacagtggtgcttcgatattcagtggtgtccccgaaatcctgctgtcttatcagctgcttcgtttgatgggcgtatcagtgtttattctatcatgggaggaagcacagatggtttaagacagaaacaagttgacaagctttcatcatcttttgggaatcttgatccctttggcacaggacagccccttcctccgttacaaattccacagcagactgctcagcatagtatagtgctgcctctgaagaagccgcccaagtggattcgaaggcctgttggtgcttctttttcatttggaggcaaactggttacgtttgagaatgtcagaatgccttctcatcagggagctgagcagcagcagcagcagcaccatgtgttcattagtcaggttgtaacagaaaaggagttcctcagccgatcagaccaacttcagcaggctgtgcagtcacaaggatttatcaattattgccaaaaaaaaattgatgcttctcagactgaatttgagaaaaatgtgtggtcctttttgaaggtaaactttgaggatgattctcgtggaaaataccttgaacttctaggatacagaaaagaagatctaggaaagaagattgctttggccttgaacaaagtggatggagccaatgtggctcttaaagactctgaccaagtagcacagagtgatggggaggagagccctgctgctgaagagcagctcttgggagagcacattaaagaggaaaaagaagaatctgaatttctaccctcatctggaggaacatttaatatctctgtcagtggggacattgatggtttaattactcaggctttgctgacgggcaattttgagagtgctgttgacctttgtttacatgataaccgcatggccgatgccattatattggccatagcaggtggacaagaactcttggctcgaacccagaaaaaatacttcgcaaaatcccaaagcaaaattaccaggctcatcactgcagtggtgatgaagaactggaaagagattgttgagtcttgtgatcttaaaaattggagagaggctttagctgcagtattgacttatgcaaagccggatgaattttcagccctttgtgatcttttgggaaccaggcttgaaaatgaaggagatagcctcctgcagactcaagcatgtctctgctatatttgtgcagggaatgtagagaaattagttgcatgttggactaaagctcaagatggaagccaccctttgtcacttcaggatctgattgagaaagttgtcatcctgcgaaaagctgtgcaactcactcaagccatggacactagtactgtaggagttctcttggctgcgaagatgagtcagtatgccaatttgttggcagctcagggcagtattgctgcagccttggcttttcttcctgacaacaccaaccagccaaatatcatgcagcttcgtgacagactttgtagagcacaaggagagcctgtagcaggacatgaatcacctaaaattccgtacgagaaacagcagctccccaagggcaggcctggaccagttgctggccaccaccagatgccaagagttcaaactcaacaatattatccccatggagaaaatcctccacctccgggtttcataatgcatggaaatgttaatccaaatgctgctggtcagcttcccacatctccaggtcatatgcacacccaggtaccaccttatccacagccacagccttatcaaccagcccagccgtatcccttcggaacaggggggtcagcaatgtatcgacctcagcagcctgttgctcctcctacttcaaacgcttaccctaacaccccttacatatcttctgcttcttcctatactgggcagtctcagctgtacgcagcacagcaccaggcctcttcacctacctccagccctgctacttctttccctcctcccccttcctctggagcatccttccagcatggcggaccaggagctccaccatcatcttcagcttatgcactgcctcctggaacaacaggtacactgcctgctgccagtgagctgcctgcgtcccaaagaacaggtcctcagaatggttggaatgaccctccagctttgaacagagtacccaaaaagaagaagatgcctgaaaacttcatgcctcctgttcccatcacatcaccaatcatgaacccgttgggtgacccccagtcacaaatgctgcagcaacagccttcagctccagtaccactgtcaagccagtcttcattcccacagccacatcttccaggtggccagcccttccatggcgtacagcaacctcttggtcaaacaggcatgccaccatctttttcaaagcccaatattgaaggtgccccaggggctcctattggaaataccttccagcatgtgcagtctttgccaacaaaaaaaattaccaagaaacctattccagatgagcacctcattctaaagaccacatttgaggatcttattcagcgctgcctttcttcagcaacagaccctcaaaccaagaggaagctagatgatgccagcaaacgtttggagtttctgtatgataaacttagggaacagacactttcaccaacaatcaccagtggtttacacaacattgcaaggagcattgaaactcgaaactactcagaaggattgaccatgcatacccacatagttagcaccagcaacttcagtgagacctctgctttcatgccagttctcaaagttgttctcacccaggccaataagctgggtgtctaaaaggacagcttctcttccactcaatattgccatttttccaaagaaacatgttaaaaaaaaaaattataagacatggactagtcctcattagcatgtttgcatagcaaccagtcaagagcatttacactatttctgctgatatactcaccttagaactgctcagaaccctggtgctttatttttgttttaatcttttgttgccagtgatgattttcctattctgcaaatagtgtatttcctggattacacatagtatggtttcctgaagtattctgataaatgtgttttttaaaacctcaatatactttttagaaaaggagcatctggttatgcataaagcagagctaaaactaaatttctttcatgtcctccctacttcctcagtgtcaatcagattaaagtgtgtaatcctaaaaa

SEQ ID NO: 120 - DNA, 3376 bp, Homo sapiens; identical to SEQ ID NO: 53

SEQ ID NO: 121 - DNA, 2941 bp, Homo sapiens
gcgcaggcgctgtgagaggcggtagcggcggcggcggcggtggtatcggcggcagctgtgagggggttccgggaagatggtgctgatcaaggaattccgtgtggttttgccatgttctgttcaggagtatcaggttgggcagctttactctgttgcagaagctagtaagaatgagactggtggtggagaaggaattgaagtcttaaagaatgaaccttatgagaaggatggagaaaagggacagtatacgcacaaaatttatcacctaaagagcaaagtgcctgcattcgtgaggatgattgctcccgagggctccttggtgtttcatgagaaagcctggaatgcgtacccctactgtagaacaattgtaacgaatgaatatatgaaagatgatttcttcattaaaatcgaaacatggcacaaaccagacttgggaacattagaaaatgtacatggtttagatccaaacacatggaaaactgttgaaattgtccatatagatattgcagatagaagtcaagttgaaccagcagactacaaagctgatgaagacccagcattattccagtcagtcaagaccaagagaggccctttgggacccaactggaagaaggagctggcaaacagccctgactgtccccagatgtgtgcctataagctggtgaccatcaaattcaagtggtggggactgcaaagcaaagtagaaaacttcattcaaaagcaagaaaaacggatatttacaaacttccatcgccagcttttttgttggattgacaagtggatcgatctcacgatggaagacattaggagaatggaagacgagactcagaaagaactagaaacaatgcgtaagaggggttccgttcgaggcacgtcggctgctgatgtctagatgagtcccctgtagggtcagagacaatgtcaaactgtttacgtaatcaaggtcaagtgaggggaacaagcgcagccagtgatgagtgaagaagaatctgaccagtatcttgcagtgttgacgtttcccagatgtgtgcttgtgatgatacacacacatgcacaggttctcaaccacgtgtgtatatatgtatgtgtgcatatgtctgtagctgtatataaagcgcatgtagagctacagatccagatacacacacttgtgtatatatgtacatacagacatactgaagggattagtacaatttctccaaagtactgtacctatcttcagcaagaatgcaaaagaaaatattttcaatatatatacctggaacagattttaataattatcagagtaataccattaatggacaaattgactgcaatgtaatactagctggtatgtttcataaatgtcaagctgtggaccaacatatatagccttttattatttttctcttcttttaagtcagtctgttataaatttttttttagtcccataagcagtagactcccacagaaaatttcttcaaaattttttggtgttccaatgaatctgggatgtaaactctgaatgtatttataactatttatttctggatggtcattatcttgtagccaaatttgacaatataaagtaaggagcaaagttacaggccagtttttacttgtttgccctgagggaaaaatccttttaaaaaaaatttctggtttttattggatttttgtattttaaatttcaaatatttttctacatcaaacctagcaaaaatggagatgacggtttctgatttataataaatactagacagttttcaggctcctgttagacaaacacattgatgaagaaattagtcttaataggattgtaggctgtgtagaaaagttggaaatatagcacttcatggagtcttgttttgaagatgacagttttctgtaactacagcttggaaactatgcaaatggtctagattcctcagagctcacatgataggatatagttagtgatgacattttgctcttcttgtgggaacacacacttcaaggaggagatagtgactttgagataggaacagtttaagatgcagtgtgagtctggcctgcgtgcggtgaggaggccccgccaagagactggtggacatctgactgtgggatgtgctctcaagtaggacgtcatcaggacagattctgaataggcatcatgagagtgctggtcagaaacggctgccactttttttaatttaattttattttttatttaaaggaaggaacaatagctaggtaagatttttatcagctttctctgtctgaatccagtttttcctctgtcagtcctggaagcttgaatagaattatattgttgaagccttcaggtcacaaactgtcttttgtaacctcctgtccctcctaaaacacgccaacccctgcagtcaaatcacattagtaatctgatttgctgacagtcctgccctgcctgctcctcgttttcccacatgtcctgcatccctcccccactggagtgatttcagtgaatcagacaaggaaggatgtgtaggatcactactgcattgcaataccctgttatcctcagcaacaaaacccacatttcatacatcctttgtgtactcaggataaagactgatgtttactctctgggcactgttgtaagataggttttgtcagagcataatcattgtctgcaaagtgtttggtgcgaggaagattattgctaattttgtgaaataaagagtctagccctctccttttaatgaacttaactctcgctggcatctgtagtatcattgggagcttaggcgcacatggaaatgagagcccggcgcatggattttaatgtttttctaacaactgtggagatttgagggaatgtgtggtgaatgtaaaatacctagtttacttgccagtctcttgtgtaaattacagtaaaacaaagtaaatgaaatttaaacaaaaaataaatttgatcacaaaatgccaaaaaaaaaaaaaaaaa

SEQ ID NO: 122 - DNA, 10511 bp, Homo sapiens
gcaggtccgggaggcgcaggcggagagcggcggtgcccccgagcccctctgcggacggctcaggcgggaggaccccgcgcggctggatggcggcggccgcgcggcctcggggtcgggcactggggccagtactgccgccgacgccgctgctcctgctggtactgcgggtgctgccagcctgcggggcgaccgctcgggatcccggggccgcggccgggctcagccttcacccgacttacttcaacctggccgaggcggcgaggatttgggccaccgccacctgcggggagaggggacccggcgaggggaggccccagcccgagctctactgcaagttggtcgggggccccaccgccccaggcagcggccacaccatccagggccagttctgtgactattgcaattctgaagaccccaggaaagcacatcctgtcaccaatgccatcgatggatctgaacgttggtggcaaagccctcccctgtcctcaggcacacagtacaacagagtcaacctcaccttggatctggggcagctcttccatgtggcctatattttaatcaaatttgcaaattctcctcgccctgatctttgggtcttggaaagatctgtagactttggaagcacctactcaccatggcaatattttgctcattctaaagtagactgtttaaaagaatttgggcgggaggcaaatatggctgtcacccgggatgatgatgtactttgtgttactgaatattcccgtattgtacctttggaaaatggtgaggttgtggtgtccttgataaacggtcgtccaggtgcaaaaaattttactttctctcacaccctgagggagtttaccaaggcaacaaacatccgcttgcgttttcttagaaccaatacgcttcttggacacctcatctccaaagcccagcgagatccaactgtcactcggcggtattattacagcataaaggacatcagcattggtgggcagtgtgtttgcaatggccatgctgaagtgtgcaatataaacaatcctgaaaaactgtttcggtgtgaatgccagcaccacacctgtggggagacgtgtgatcgctgctgcacagggtacaatcagaggcgctggcggcccgccgcttgggagcagagccacgagtgtgaagcatgcaactgccacggccatgccagcaactgttactatgatccagatgttgagcggcagcaggcaagcttgaatacccagggcatctatgctggtggaggggtctgcattaactgtcagcacaacacagctggagtaaactgtgaacagtgtgctaagggctattaccgcccttatggggttccagtggatgcccctgatggctgcatcccctgcagctgtgaccctgagcatgcggatggctgtgaacagggttcaggccgctgtcactgcaagccaaatttccacggagacaactgtgagaagtgtgcaattggatactacaatttcccattttgcttgagaattcccatttttcctgtttctacaccaagttcagaagatccagtagctggagatataaaagggtgtgactgtaatctggaaggtgttctccctgaaatatgtgatgcccacggacggtgcctgtgccgccctggggttgagggccctcgatgtgatacctgccgctctggtttctactcattccctatttgccaagcctgctggtgttcagcccttggatcctaccagatgccctgcagctcagtgactggacagtgtgaatgtcggccaggagttacaggacagcggtgtgacaggtgtctctcaggagcttatgatttcccccactgccaaggttccagcagtgcttgtgacccagctggtaccatcaactccaatttggggtattgccaatgcaagcttcatgttgaaggtcctacttgtagccgctgcaaactgttatattggaatctggacaaagaaaaccccagtggatgttcagaatgcaagtgccataaggcgggaacagtgagtggaactggagagtgtaggcagggagatggtgactgtcactgcaagtcccatgtgggtggcgattcctgcgacacctgtgaagatggatattttgctttggaaaagagcaattactttgggtgtcaagggtgtcagtgtgacattggtggggcattgtcctccatgtgcagtgggccctcgggagtgtgccagtgccgagagcatgtcgtgggaaaggtgtgccagcggcctgaaaacaactactatttcccagatttgcatcatatgaagtatgagattgaagacggcagcacacctaatgggagagaccttcgatttggatttgatccgctggcatttcctgagtttagctggagaggatatgcccaaatgacctcagtacagaatgatgtaagaataacattgaatgtagggaagtcaagtggctccttgtttcgtgttattctgagatacgttaaccctggaactgaagcagtatctggccatataactatttatccatcctggggtgctgctcaaagcaaagagatcatcttcctgccgagtaaggagccagcctttgtcactgtccctggaaatggttttgcagacccattttcaatcacaccaggaatatgggttgcttgtattaaggcagaaggagtccttctggattacctggtgctgctccccagggactactatgaagcctctgtactgcagctgccagtcacagaaccatgtgcctacgcaggacctccccaagaaaattgcttactctaccagcatttgccagtgaccagattcccctgtaccctggcttgtgaggccagacacttcctgcttgatggggagccaagacccgtggcagtgaggcagcccacacctgcacaccctgtcatggtggacctcagcgggagagaggtggaattgcatctgcggctgcgcatcccacaggttggccactacgtggttgtggtcgagtattccacggaggcagctcagctgtttgtggttgatgtgaatgtgaagagctccgggtctgttctggcaggccaggtgaacatttacagctgcaactacagtgttctctgccggagtgctgtgattgatcacatgagccgcatcgccatgtatgagctattggcagatgcagacattcagctcaagggacacatggcccgattccttctgcatcaagtttgtatcatacctattgaagaattctcagctgagtatgtgagaccacaagtccactgcattgccagttatgggcgatttgtcaatcaaagtgccacctgtgtctccttggcccatgaaactcctccaacagcattaattttggatgttctaagtggcaggcctttccctcacctgccccagcagtcgtcaccttctgttgatgttcttcctggggtcaccttgaaggcaccgcagaatcaagtgaccctgagaggacgtgtaccacacctgggccgatacgtctttgtcatccatttttaccaagcagcgcacccgacgtttcccgcgcaggtgtcggtggatggcgggtggccacgggcaggctccttccatgcctctttttgcccccatgtgcttggctgccgggatcaagtgattgccgaaggccagattgagtttgacatctcagagcctgaagtggccgcaactgtgaaggttccagaaggaaagtccttggttttggtccgtgttctagtggtgcctgcagaaaactatgactaccaaatacttcacaaaaaatccatggacaagtcactcgagtttatcaccaattgtggaaaaaacagcttttaccttgacccccagacagcctccagattctgtaagaattccgccaggtccctggtggccttttaccacaagggcgccctgccttgtgagtgccaccccactggggccaccggccctcactgcagccctgagggtgggcagtgcccatgccagcccaacgtcatcgggcggcagtgcacccgctgtgcaacaggccactacggattcccacgctgcaagccgtgcagctgtggtcggcgcctttgtgaagagatgacggggcagtgccgctgccctccccgcacggtcaggccccagtgtgaggtgtgtgagacacactcattcagcttccaccccatggccggctgcgaaggctgcaactgttccaggaggggcaccatcgaggctgccatgccggagtgtgaccgggacagcgggcagtgcagatgcaagcccagaatcacagggcggcagtgtgaccgatgtgcttccgggttttaccgctttcctgagtgtgttccctgcaattgcaacagagatgggactgagccaggagtgtgtgacccagggaccggggcttgcctctgcaaggaaaatgtagaaggcacagagtgtaatgtgtgtcgagaaggctcattccatttggacccagccaatctcaagggttgtaccagctgtttctgttttggagtaaataatcaatgtcacagctcacataagcgaaggactaagtttgtggatatgctgggctggcacctggagacagcagacagagtggacatccctgtctctttcaacccaggcagcaacagtatggtggcggatctccaggagctgcccgcaaccatccacagcgcgtcctgggtcgcacccacctcctacctgggggacaaggtttcttcatatggtggttacctcacttaccaagccaagtcctttggcttgcctggcgacatggttcttctggaaaagaagccggatgtacagctcactggtcagcacatgtccatcatctatgaggagacaaacaccccacggccagaccggctgcatcatggacgagtgcacgtggtcgagggaaacttcagacatgccagcagccgtgccccagtgtctagggaggagctgatgacagtgctgtctagactggcagatgtgcgcatccaaggcctctacttcacagagactcaaaggctcaccctgagcgaggtggggctagaggaagcctctgacacaggaagtgggcgcatagcacttgctgtggaaatctgtgcctgcccccctgcctacgctggtgactcttgtcagggttgtagccctggatactatcgggatcataaaggcttgtataccggacggtgtgttccctgcaattgcaacggacattcaaatcaatgccaggatggctcaggcatatgtgttaactgtcagcacaacaccgcgggagagcactgtgaacgctgccaggagggctactatggcaacgccgtccacggatcctgcagggcctgcccatgtcctcacactaacagctttgccactggctgtgtggtgaatgggggagacgtgcggtgctcctgcaaagctgggtacacaggaacacagtgtgaaaggtgtgcaccgggatatttcgggaatccccagaaattcggaggtagctgccaaccatgcagttgtaacagcaatggccagctgggcagctgtcatcccctgactggagactgcataaaccaagaacccaaagatagcagccctgcagaagaatgtgatgattgcgacagctgtgtgatgaccctcctgaacgacctggccaccatgggcgagcagctccgcctggtcaagtctcagctgcagggcctgagtgccagcgcagggcttctggagcagatgaggcacatggagacccaggccaaggacctgaggaatcagttgctcaactaccgttctgccatttcaaatcatggatcaaaaatagaaggcctggaaagagaactgactgatttgaatcaagaatttgagactttgcaagaaaaggctcaagtaaattccagaaaagcacaaacattaaacaacaatgttaatcgggcaacacaaagcgcaaaagaactggatgtgaagattaaaaatgtcatccggaatgtgcacattcttttaaagcagatctctgggacagatggagagggaaacaacgtgccttcaggtgacttttccagagagtgggctgaagcccagcgcatgatgagggaactgcggaacaggaactttggaaagcacctcagagaagcagaagctgataaaagggagtcgcagctcttgctgaaccggataaggacctggcagaaaacccaccagggggagaacaatgggcttgctaacagtatccgggattctttaaatgaatacgaagccaaactcagtgaccttcgtgctcggctgcaggaggcagctgcccaagccaagcaggcaaatggcttgaaccaagaaaacgagagagctttgggagccattcagagacaagtgaaagaaataaattccctgcagagtgatttcaccaagtatctaaccactgcagactcatctttgttgcaaaccaacattgcgctgcagctgatggagaaaagccagaaggaatatgaaaaattagctgccagtttaaatgaagcaagacaagaactaagtgacaaagtaagagaactttccagatctgctggcaaaacatcccttgtggaggaggcagaaaagcacgcgcggtccttacaagagctggcaaagcagctggaagagatcaagagaaacgccagcggggatgagctggtgcgctgtgctgtggatgccgccaccgcctacgagaacatcctcaatgccatcaaagcggccgaggacgcagccaacagggctgccagtgcatctgaatctgccctccagacagtgataaaggaagatctgccaagaaaagctaaaaccctgagttccaacagtgataaactgttaaatgaagccaagatgacacaaaagaagctaaagcaagaagtcagtccagctctcaacaacctacagcaaaccctgaatattgtgacagttcagaaagaagtgatagacaccaatctcacaactctccgagatggtcttcatgggatacagagaggtgatattgatgctatgatcagtagtgcaaagagcatggtcagaaaggccaacgacatcacagatgaggttctggatgggctcaaccccatccagacagatgtggaaagaattaaggacacctatgggaggacacagaacgaagacttcaaaaaggctctgactgatgcagataactcggtgaataagttaaccaacaaactacctgatctttggcgcaagattgaaagtatcaaccaacagctgttgcccttgggaaacatctctgacaacatggacagaatacgagaactaattcagcaggccagagatgctgccagtaaggttgctgtccccatgaggttcaatggtaaatctggagtcgaagtccgactgccaaatgacctggaagatttgaaaggatatacatctctgtccttgtttctccaaaggcccaactcaagagaaaatgggggtactgagaatatgtttgtgatgtaccttggaaataaagatgcctcccgggactacatcggcatggcagttgtggatggccagctcacctgtgtctacaacctgggggaccgtgaggctgaactccaagtggaccagatcttgaccaagagtgagactaaggaggcagttatggatcgggtgaaatttcagagaatttatcagtttgcaaggcttaattacaccaaaggagccacatccagtaaaccagaaacacccggagtctatgacatggatggtagaaatagcaatacactccttaatttggatcctgaaaatgttgtattttatgttggaggttacccacctgattttaaacttcccagtcgactaagtttccctccatacaaaggttgtattgaattagatgacctcaatgaaaatgttctgagcttgtacaacttcaaaaaaacattcaatctcaacacaactgaagtggagccttgtagaaggaggaaggaagagtcagacaaaaattattttgaaggtacgggctatgctcgagttccaactcaaccacatgctcccatcccaacctttggacagacaattcagaccaccgtggatagaggcttgctgttctttgcagaaaacggggatcgcttcatatctctaaatatagaagatggcaagctcatggtgagatacaaactgaattcagagctaccaaaagagagaggagttggagacgccataaacaacggcagagaccattcgattcagatcaaaattggaaaactccaaaagcgtatgtggataaatgtggacgttcaaaacactataattgatggtgaagtatttgatttcagcacatattatctgggaggaattccaattgcaatcagggaaagatttaacatttctacgcctgctttccgaggctgcatgaaaaatttgaagaaaaccagtggtgtcgttagattgaatgatactgtgggagtaaccaaaaagtgctcggaagactggaagcttgtgcgatctgcctcattctccagaggaggacaattgagtttcactgatttgggcttaccacctactgaccacctccaggcctcatttggatttcagacctttcaacccagtggcatattattagatcatcagacatggacaaggaacctgcaggtcactctggaagatggttacattgaattgagcaccagcgatagcggcagcccaatttttaaatctccacagacgtatatggatggtttactgcattatgtatctgtaataagcgacaactctggactacggcttctcatcgatgaccagcttctgagaaatagcaaaaggctaaaacacatttcaagttcccggcagtctctgcgtctgggcgggagcaattttgagggttgtattagcaatgtttttgtccagaggttatcactgagtcctgaagtcctagatttgaccagtaactctctcaagagagatgtgtccctgggaggctgcagtttaaacaaaccaccttttctaatgttgcttaaaggttctaccaggtttaacaagaccaagacttttcgtatcaaccagctgttgcaggacacaccagtggcctccccaaggagcgtgaaggtgtggcaagatgcttgctcaccacttcccaagacccaggccaatcatggagccctccagtttggggacattcccaccagccacttgctattcaagcttcctcaggagctgctgaaacccaggtcacagtttgctgtggacatgcagacaacatcctccagaggactggtgtttcacacgggcactaagaactcctttatggctctttatctttcaaaaggacgtctggtctttgcactggggacagatgggaaaaaattgaggatcaaaagcaaggagaaatgcaatgatgggaaatggcacacggtggtgtttggccatgatggggaaaaggggcgcttggttgtggatggactgagggcccgggagggaagtttgcctggaaactccaccatcagcatcagagcgccagtttacctgggatcacctccatcagggaaaccaaagagcctccccacaaacagctttgtgggatgcctgaagaactttcagctggattcaaaacccttgtataccccttcttcaagcttcggggtgtcttcctgcttgggtggtcctttggagaaaggcatttatttctctgaagaaggaggtcatgtcgtcttggctcactctgtattgttggggccagaatttaagcttgttttcagcatccgcccaagaagtctcactgggatcctaatacacatcggaagtcagcccgggaagcacttatgtgtttacctggaggcaggaaaggtcacggcctctatggacagtggggcaggtgggacctcaacgtcggtcacaccaaagcagtctctgtgtgatggacagtggcactcggtggcagtcaccataaaacaacacatcctgcacctggaactggacacagacagtagctacacagctggacagatccccttcccacctgccagcactcaagagccactacaccttggaggtgctccagccaatttgacgacactgaggatccctgtgtggaaatcattctttggctgtctgaggaatattcatgtcaatcacatccctgtccctgtcactgaagccttggaagtccaggggcctgtcagtctgaatggttgtcctgaccagtaacccaagcctatttcacagcaaggaaattcaccttcaaaagcactgattacccaatgcacctccctccccagctcgagatcattcttcactcaggacacaaaccagacaggtttaatagcgaatctaattttgaattctgaccatggatacccatcactttggcattcagtgctacatgtgtattttatataaaaatcccatttcttgaagataaaaaaattgttattcaaattgttatgcacagaatgtttttggtaatattaatttccactaaaaaattaaatgtcttttaagaaacattcttttccacttgttaaaaaaattaaatatattttaaagcactttaagaatatgaaactttcatatatgttaaaggattataatttatggaattaaaaaatgcagtgtagtccttaaaaaaaa

SEQ ID NO: 123 - DNA, 1717 bp, Homo sapiens
ctgagtaactgtgattccccaggtgatggcatcagctgagaagggaaggaagcccatgagaggacactgaagaaggagtgagcagacaataagaagcccacagaagacagagaaggaacaactagagggagaagccaaggcaggcgtgtgtggtaacacataggaactgagggagaggacatttcaagatggtggggatgccatacaacaggactatgtgatggtttttggctgtgtccataggaagtcacaacaggcaagggaaagaaaccagaacccagtcatggagctaagaagtgagtcagagagtagaggggtagggacagtgaggtaagtcctctttctaaggaagtttggctgaaggatagactagctggacacatgctggctgtgtggggtagagggaggaatgatggagggtaggagagccttgagcctgcgagaagagtctcttagaatagagaagctgaagttaaagttgtggaagagagtggggataactgagtgacagataatcaggagaagaaaaggagatccagactcatgacagagagatgacctttgccaagagtacagccgtctttcacggtcacagagaggtaggacaaaatgagtggtgttcaagaattggtttgtagcacaatatttcaactatgtcctttaaaaagtttctccacagacactacccaaagcagtgcttcactacagtggcagacagacctgaaaattttcatctgaagcagcagagtgaactgcagaggcaggtcaccaaccagtgtggaggctaaaagcgggcctctttggggattccaggtggaagtgttggacatctgtagtattcctggtctcgaatcatcctgatattcttcattttgttattcacattggactagggtgaggaaatgagttctggtcagagtcaatgtttcccaacaatgttgatttatttggtcctaaatatttaaacacattttataaatagcttttccacaccacatatatagggaaaaacagggagttaacttggcccagcagcactgtttgtggggctaacaccctgtctgtgtatctcacaccaaccctaagctttgtttctctcctgtcactttgctcctatttctttcatgtgaaagaatgttcattttctttgaaaatgagctcatttcctcattttctttccatatttcagcaggaacaaagatcaccacaactggctcgccttcaactatgttagatggcaacttgccttcagtatggtgaaacacatcagttaagaccggggttgtgcatggcaggactttctacaaggacacccagtctccttaataaacatgagatgctctctttccagaatttctcttgcctgacacagcataggaagatgctgaacggccacacagtgatccattggtcagtggtgacataaggaggtcagaggggaggagtgaggagaagtagggaagactaggtggttgtaggcctccttcatctgttcattggctgtggcattaggccagctactctttgcacttctgtaaagtgagacggtcgatcttgtctgcctctctagaggatggttgcaggtgtcaaatggggtagttaggtgggagggcatttcacaaagttaaaaaatatgactttggaggcttgttatattgatgaggattataatccctgagaattcctggtatgaagaagggaaaagaagataatttgt

SEQ ID NO: 124 - DNA, 4618 bp, Homo sapiens; identical to SEQ ID NO: 3

SEQ ID NO: 125 - DNA, 4121 bp, Homo sapiens
ctgcgcctcgggggtcggcgtccaggctcggagcgcggcacggagacggcggcagcgctggactaggtggcaggccctgcatcatggaaactctttctaatgcaagtggtacttttgccatacgccttttaaagatactgtgtcaagataacccttcgcacaacgtgttctgttctcctgtgagcatctcctctgccctggccatggttctcctaggggcaaagggaaacaccgcaacccagatggcccaggcactgtctttaaacacagaggaagacattcatcgggctttccagtcgcttctcactgaagtgaacaaggctggcacacagtacctgctgagaacggccaacaggctctttggagagaaaacttgtcagttcctctcaacgtttaaggaatcctgtcttcaattctaccatgctgagctgaaggagctttcctttatcagagctgcagaagagtccaggaaacacatcaacacctgggtctcaaaaaagaccgaaggtaaaattgaagagttgttgccgggtagctcaattgatgcagaaaccaggctggttcttgtcaatgccatctacttcaaaggaaagtggaatgaaccgtttgacgaaacatacacaagggaaatgccctttaaaataaaccaggaggagcaaaggccagtgcagatgatgtatcaggaggccacgtttaagctcgcccacgtgggcgaggtgcgcgcgcagctgctggagctgccctacgccaggaaggagctgagcctgctggtgctgctgcctgacgacggcgtggagctcagcacggtggaaaaaagtctcacttttgagaaactcacagcctggaccaagccagactgtatgaagagtactgaggttgaagttctccttccaaaatttaaactacaagaggattatgacatggaatctgtgcttcggcatttgggaattgttgatgccttccaacagggcaaggctgacttgtcggcaatgtcagcggagagagacctgtgtctgtccaagttcgtgcacaagagttttgtggaggtgaatgaagaaggcaccgaggcagcggcagcgtcgagctgctttgtagttgcagagtgctgcatggaatctggccccaggttctgtgctgaccaccctttccttttcttcatcaggcacaacagagccaacagcattctgttctgtggcaggttctcatcgccataaagggtgcacttaccgtgcactcggccatttccctcttcctgtgtccccagatccccactacagctccaagaggatgggcctagaaagccaagtgcaaagatgagggcagattccttacctgtctgccctcatgatttgccagcatgaattcatgatgctccacactcgcttatgctacttaatcagaatcttgagaaaatagaccataatgattccctgttgtattaaaattgcagtccaaatcccataggatggcaagcaaagttcttctagaattccacatgcaattcactctggcgaccctgtgctttcctgacactgcgaatacattccttaacccgctgcctcagtggtaataaatggtgctagatattgctactattttatagatttcctggtgcttagccttataaaaaaggttgtaaaatgtacatttatattttatcttttttttttttttttttctgagacgcagtctggctctctgtcgcccaggctggagtgcagtggctcgatctctgctcactgcaagctccgcctcccgggttcacgccattctcctgcctcagcctcccgagtagctgggactacaggcgcccgccaccacgcccggctaattttttgtatttttagtagagacggggtttcaccgtgttagccaggatggtgtcgatctcctgacctcgtgatccacccgcctcggcctcccaaagtgctgggattacaggcttgagccaccgcgcccggctatattttatcttttatctttttctttgacatttaccaatcaccaagcatgcaccaaacactgctttaggcactggggacacaaaggggacagagccatcctcctttgacacctggtcttcagttctgtgcccaacgtatatagttttgacaatgaccaggttggactgtttaatgtctttcaacttaccacgtaatcctcttgtagggatcacatctttctttatgatattgtatttctctacctctaacagtaaaaattccattcaacccttaaagctcacttcaaattcttctttgagaagtttttcctttctccgcaaccagatgtacatatttgaactctctttgtacttggagggcacttctttcgtggtagttcttttatttttattaatctctgtatccttagatagtcctccaacaaccaaaggttgggactctgtcttacatatctgggtgcccctcatagtgcagtaataagtaagttgattatatacgagctatgtaacttatattttttaatggttggatatcactgagtttttttttttaagaatttttttattgaggtaaacttcacataacataaaattaactattttaaagtgagaagttcagtgccacttagtattgttaacaatgttgcataaccaccacctttatttaaagttccaaaaaaaatgttctcctctaaaaggaaaccccatcccattaagcagatactctccattccttccttcctccagcccccagcaaccaccaatctgctttctgtctctatggttttatctattcttgctattttatataaatcgaattgtatgagaccttttgtgtctggcttctttcacttagtacaagtttttgagatttatttacatagtagcatgtatcaacacttcatttttatggccaaataaaattgtattatgtgtttatagcacaatttatttatccactcattcattgatggactttgggttgtttctgacttttggctattgggaatagtgctgctatgaatgtttgtgtacctgtatttgtttgaatgcctattttgcattctcttgggtatatatctaggagtggaactgctgggtcatatgttaattctatgtttagctttttgaggaacagacaaactgttttccacagcagttgaaccattccacattcccaccagcaatgtatgagaattccaatttctgtccacttcctcaccaacacttattattttccttttcctttttttaaaaaaaataagttatggccatcttagtgggtgtgaagtggtatctcattgtgttttttatttgcatttcctatgtaatgagctagaaactaaagtacaaactagatgggacatccagtccctttgatagataatgctgagtaaaaaatgagatgaaagacatttgtttgtttttagaacatgagtgacagtttgttaaaaagctttagaggaggaatgaaaacaaagtgaagtacacttagaaaagggccaagtggacatcttggatgtcaagtgcctagttcagtatcttttttttttttttttttttttttgagacagtgcctcactctgtcacccaggctggagtgtagtggcatgatctgggctcactgcaacctcctcctcctggattcaagcaattctcttgcttcagcctcccaagtagctgagactacaagcacccaccaccacacccggctaattttgtatttttcagtagagacggggtttcgccacattggccgtgttggtcttgaactcctggcctcaagcaatccgcctacctcagcctcccaaagtgctaggattacaggcataagccactgagcccagccctagttcagtatcttttatgtaaattataaacatctgcaacattatgtatcatatgcagatacttattgcatttcttttattagtggtgaaagtgttctatgcatttattggctcttgaatttcctcatctatgaattgtcattcacacacctacttttctgcttcgtttttacatatgtctttgcctattaaagatattatccctctgttttatattttctctcattcttgtattgccttttaaattttgttatgatgtttcattaataaacagtgttttgttttcctctataaaaaaaaaaaaaaaa

SEQ ID NO: 126 - DNA, 2834 bp, Homo sapiens
gtctgcggaagtggtgacccgtgggacgcggctgagacaggagactgaaaggaaccataatttgtgacatcagttgttttctttgataagcagctatttatgattctggaagattaaggcagataggaaaccccatctgagattttaataaatccctcaaacaataaaccacatcatggacatacagctggaccctgccagagatgacctgcctctcatggccaacaccagccacatacttgtgaagcactatgtactggatttggatgtggattttgaaagtcaagtcattgaggggaccatagtgcttttcctcgaggatggaaacagattcaagaaacagaatagctctattgaggaagcctgccaatcagaatcaaacaaagcctgcaaatttgggatgcctgaaccctgccatattcccgtgacaaatgcaaggaccttctcatctgaaatggaatataatgattttgcaatctgtagtaaaggtgaaaaagatacttctgataaagatggtaaccatgacaaccaggaacatgcttctgggatttctagctcaaagtactgctgtgacacagggaatcatgggagtgaggattttttgctagtgttggactgctgtgatttatctgtgttaaaagtcgaggaggtggatgttgctgctgtgccaggtctggaaaaatttacaaggtctcctgagctcacggttgtttctgaggagttcaggaatcagattgtacgtgaacttgtgactttgcctgcaaatcgttggagggagcagttagactattacgctcgctgcagccaggctcctggctgtggggaactcctctttgacactgacacttggagcttgcagataaggaagacaggggctcagacagctactgactttcctcatgctatcaggatatggtacaaaactaaacctgaagggcgatcggttacatggacctcagaccagagtggcaggccatgtgtttatactgtgggatctcccataaacaacagggccctttttccatgccaggagccacccgttgccatgtcaacatggcaggctacagttcgagcagctgcatcttttgttgttttaatgagtggggaaaattctgccaaaccaacgcagctttgggaagagtgctcaagctggtattactatgtaactatgccaatgccagcctccaccttcacaattgcagtgggatgctggacagaaatgaagatggagacatggtcatcaaatgatttggcaacagagagacccttctcaccttctgaggccaacttcaggcatgttggtgtttgcagtcacatggaatacccctgccgcttccagaatgcttctgccaccacccaggagatcattcctcatcgggtctttgcccctgtgtgcctcacgggtgcctgccaagagacccttctgcggctgatccctccttgcctctcagcagcacattctgttctgggagcacacccgttctctcggctggatgttctcatcgtccctgccaactttccaagtctggggatggccagacccagtaaagacaaaactggccacacaagtgactcgggagcatctgttatcaagcatggacttaatccggagaagatcttcatgcaggtgcattatttaaagggctacttccttcttcggtttcttgccaaaagacttggagatgaaacctatttttcatttttaagaaaatttgtgcacacatttcatggacagctgattctttcccaggatttccttcaaatgctactggagaacattccagaagaaaaaaggcttgagctgtctgttgaaaacatctaccaagactggcttgagagttccggaataccaaagccgctgcagagggagcgtcgcgccggggcggagtgcgggcttgcgcggcaagtgcgcgccgaggtcacgaaatggattggagtgaaccggagaccccgaaaacggaagcgcagggagaaggaagaggtgtttgaaaagcttcttccagaccagctggtcttgcttctggagcatctcttggagcagaagactctgagcccccgaactctgcaaagcctccagaggacataccacctccaggatcaggatgcagaggttcgccatcggtggtgtgaactcattgttaagcacaagttcacgaaagcctacaaaagtgtggagaggttccttcaggaggatcaggccatgggtgtgtacctctacggggagctgatggtgagtgaggacgccagacagcagcagctcgcccgtaggtgcttcgagcggaccaaggagcagatggataggtcctcagcccaggtggtggccgaaatgttattttaacgaggaaagaccacagcaagattctttcattcgtctcctcctagcctgggggaccaggctcgaactgaccctggacatcaaaggagggattatgtggctgctaaagccatcggcccacagccctgttcacgtcttggtgcttctctttcccagaggctggtcccagccaggcacacacaaaaggcagattctcgtaaacgcagcctccctccctggaggctgcctcctgccctggatctggagtggagctgctctgagattttgagttcttctgcagagatgattaaatatatccaagagacattggaaaacctgctgaacattttacattggtctgctcagcacatggctggatgcggatatttctataattccagaaagtcacacagctcctctgtatgagaccagtgggcgccatttaaaagaacaggatgagaatctaagatatattattaataaatgtaatggattttttttttgtaaaaaaaaaaaaaaa

SEQ ID NO: 127 - DNA, 1891 bp, Homo sapiens
cacttaacagccacttgtttcatcccacctgggcattaggttgacttcaaagatgcctcagttactgcaaaacattaatgggatcatcgaggccttcaggcgctatgcaaggacggagggcaactgcacagcgctcacccgaggggagctgaaaagactcttggagcaagagtttgccgatgtgattgtgaaaccccacgatccagcaactgtggatgaggtcctgcgtctgctggatgaagaccacacagggactgtggaattcaaggaattcctggtcttagtgtttaaagttgcccaggcctgtttcaagacactgagcgagagtgctgagggagcctgcggctctcaagagtctggaagcctccactctggggcctcgcaggagctgggcgaaggacagagaagtggcactgaagtgggaagggcggggaaagggcagcattatgaggggagcagccacagacagagccagcagggttccagagggcagaacaggcctggggttcagacccagggtcaggccactggctctgcgtgggtcagcagctatgacaggcaagctgagtcccagagccaggaaagaataagcccgcagatacaactctctgggcagacagagcagacccagaaagctggagaaggcaagaggaatcagacaacagagatgaggccagagagacagccacagaccagggaacaggacagagcccaccagacaggtgagactgtgactggatctggaactcagacccaggcaggtgccacccagactgtggagcaggacagcagccaccagacaggaagaaccagcaagcagacacaggaggccaccaatgaccagaacagagggactgagacccacggtcaaggcaggagccagaccagccaggctgtgacaggaggacatgctcagatacaggcagggacacacacccagacacccacccagaccgtggagcaggacagcagccaccagacaggaagcaccagcacccagacacaggagtccaccaatggccagaacagagggactgagatccacggtcaaggcaggagccagaccagccaggctgtgacaggaggacacactcagatacaggcagggtcacacaccgagactgtggagcaggacagaagccaaactgtaagccacggaggggctagagaacagggacagacccagacgcagccaggcagtggtcaaagatggatgcaagtgagcaaccctgaggcaggagagacagtaccgggaggacaggcccagactggggcaagcactgagtcaggaaggcaggagtggagcagcactcacccaaggcgctgtgtgacagaagggcagggagacagacagcccacagtggttggtgaggaatgggttgatgaccactcaagggagacagtgatcctcaggctggaccagggcaacttgcataccagtgtttcctcagcacagggccaggatgcagcccagtcagaagagaagcgaggcatcacagctagagagctgtattcctacttgagaagcaccaagccatgacttccccgactccaatgtccagtactggaagaagacagctggagagagtttggcttgtcctgcatggccaatccagtgggtgcatccctggacatcagctcttcattatgcagcttcccttttaggtctttctcaatgagataatttctgcaaggagctttctatcctgaactcttctttcttacctgctttgcggtgcagaccctctcaggagcaggaagactcagagcaagtcacccctttgtactgaattgtcctcatcttgtggggggtttcaggactatttttatctctgacatctctctattgccccatctaccctaatgcatcaataaaaccttaagccgctgg

SEQ ID NO: 128 - DNA, 8019 bp, Homo sapiens
gcggcccggtgcgggtgtcggggagaccgggctctctgcccggcgcggcgcggcgcggctcggcccacgagcgaccaccgacatggagtgggctcgggcggccaagtagccgcttctccggagcccggtgccagtgccgcccgcagcccgccttccacccccggccgcgccgccggtcaggccctagggtgaagccgggaggaaaatgaagagttttcaccggaatccgttgaaaataggactgactgcaaagccttaaagaaagaaggacctcgggaggagaaacgaaaagccgcctccgggcaagacttggcgtgctccgagccgaggggctgcttcagggacctcgccccctccctttcccgctggagaaattgccgctgatgcattatccaagtggtggttgggaggatttgcagcaacatttttggttttccctcccccttctatgcattctgtttttttcctcccttttctgtttttcttcttcccgggaagtgaattgctgatgcaaatcggactttattcattaatgatgcaaccggattcgtttcaggattacgttgcacgagttgaattttgaatgaaggagaagagtttttttttttttttttaaagaagtgttgactctctagttcgttgtacttttaattattattttatttaaatatacgacttaattgtattcttttaaaaatgcattaagtatatattttatggtaatttaccctcaaaatatatgtatatgggtgaaattgaagacgcttcagttaagtgaggttactggtgtgttggatgtttaattcagcaccagcattgcatgacagttgtttgaataacaagtggtttatttttaaaaccataccttttaaaatttaggttcagataatagtaaaagtcatcataataatttaaaggaaaaccagcagaaatcgaagcaaacatgtctggagaagtgcgtttgaggcagttggagcagtttattttggacgggcccgctcagaccaatgggcagtgcttcagtgtggagacattactggatatactcatctgcctttatgatgaatgcaataattctccattgagaagagagaagaacattctcgaatacctagaatgggctaaaccatttacttctaaagtgaaacaaatgcgattacatagagaagactttgaaatattaaaggtgattggtcgaggagcttttggggaggttgctgtagtaaaactaaaaaatgcagataaagtgtttgccatgaaaatattgaataaatgggaaatgctgaaaagagctgagacagcatgttttcgtgaagaaagggatgtattagtgaatggagacaataaatggattacaaccttgcactatgctttccaggatgacaataacttatacctggttatggattattatgttggtggggatttgcttactctactcagcaaatttgaagatagattgcctgaagatatggctagattttacttggctgagatggtgatagcaattgactcagttcatcagctacattatgtacacagagacattaaacctgacaatatactgatggatatgaatggacatattcggttagcagattttggttcttgtctgaagctgatggaagatggaacggttcagtcctcagtggctgtaggaactccagattatatctctcctgaaatccttcaagccatggaagatggaaaagggagatatggacctgaatgtgactggtggtctttgggggtctgtatgtatgaaatgctttacggagaaacaccattttatgcagaatcgctggtggagacatacggaaaaatcatgaaccacaaagagaggtttcagtttccagcccaagtgactgatgtgtctgaaaatgctaaggatcttattcgaaggctcatttgtagcagagaacatcgacttggtcaaaatggaatagaagactttaagaaacacccatttttcagtggaattgattgggataatattcggaactgtgaagcaccttatattccagaagttagtagcccaacagatacatcgaattttgatgtagatgatgattgtttaaaaaattctgaaacgatgcccccaccaacacatactgcattttctggccaccatctgccatttgttggttttacatatactagtagctgtgtactttctgatcggagctgtttaagagttacggctggtcccacctcactggatcttgatgttaatgttcagaggactctagacaacaacttagcaactgaagcttatgaaagaagaattaagcgccttgagcaagaaaaacttgaactcagtagaaaacttcaagagtcaacacagactgtccaagctctgcagtattcaactgttgatggtccactaacagcaagcaaagatttagaaataaaaaacttaaaagaagaaattgaaaaactaagaaaacaagtaacagaatcaagtcatttggaacagcaacttgaagaagctaatgctgtgaggcaagaactagatgatgcttttagacaaatcaaggcttatgaaaaacaaatcaaaacgttacaacaagaaagagaagatctaaataaggaactagtccaggctagtgagcgattaaaaaaccaatccaaagagctgaaagacgcacactgtcagaggaaactggccatgcaggaattcatggagatcaatgagcggctaacagaattgcacacccaaaaacagaaacttgctcgccatgtccgagataaggaagaagaggtggacctggtgatgcaaaaagttgaaagcttaaggcaagaactgcgcagaacagaaagagccaaaaaagagctggaagttcatacagaagctctagctgctgaagcatctaaagacaggaagctacgtgaacagagtgagcactattctaagcaactggaaaatgaattggagggactgaagcaaaaacaaattagttactcaccaggagtatgcagcatagaacatcagcaagagataaccaaactaaagactgatttggaaaagaaaagtatcttttatgaagaagaattatctaaaagagaaggaatacatgcaaatgaaataaaaaatcttaagaaagaactgcatgattcagaaggtcagcaacttgctctcaacaaagaaattatgattttaaaagacaaattggaaaaaaccagaagagaaagtcaaagtgaaagggaggaatttgaaagtgagttcaaacaacaatatgaacgagaaaaagtgttgttaactgaagaaaataaaaagctgacgagtgaacttgataagcttactactttgtatgagaacttaagtatacacaaccagcagttagaagaagaggttaaagatctagcagacaagaaagaatcagttgcacattgggaagcccaaatcacagaaataattcagtgggtcagcgatgaaaaggatgcacgagggtatcttcaggccttagcttctaaaatgactgaagaattggaggcattaagaaattccagcttgggtacacgagcaacagatatgccctggaaaatgcgtcgttttgcgaaactggatatgtcagctagactggagttgcagtcggctctggatgcagaaataagagccaaacaggccatccaagaagagttgaataaagttaaagcatctaatatcataacagaatgtaaactaaaagattcagagaagaagaacttggaactactctcagaaatcgaacagctgataaaggacactgaagagcttagatctgaaaagggtatagagcaccaagactcacagcattctttcttggcatttttgaatacgcctaccgatgctctggatcaatttgaaactgtagactccactccactttcagttcacacaccaaccttaaggaaaaaaggatgtcctggttcaactggctttccacctaagcgcaagactcaccagttttttgtaaaatcttttactactcctaccaagtgtcatcagtgtacctccttgatggtgggtttaataagacagggctgttcatgtgaagtgtgtggattctcatgccatataacttgtgtaaacaaagctccaaccacttgtccagttcctcctgaacagacaaaaggtcccctgggtatagatcctcagaaaggaataggaacagcatatgaaggtcatgtcaggattcctaagccagctggagtgaagaaagggtggcagagagcactggctatagtgtgtgacttcaaactctttctgtacgatattgctgaaggaaaagcatctcagcccagtgttgtcattagtcaagtgattgacatgagggatgaagaattttctgtgagttcagtcttggcttctgatgttatccatgcaagtcggaaagatataccctgtatatttagggtcacagcttcccagctctcagcatctaataacaaatgttcaatcctgatgctagcagacactgagaatgagaagaataagtgggtgggagtgctgagtgaattgcacaagattttgaagaaaaacaaattcagagaccgctcagtctatgttcccaaagaggcttatgacagcactctacccctcattaaaacaacccaggcagccgcaatcatagatcatgaaagaattgctttgggaaacgaagaagggttatttgttgtacatgtcaccaaagatgaaattattagagttggtgacaataagaagattcatcagattgaactcattccaaatgatcagcttgttgctgtgatctcaggacgaaatcgtcatgtacgactttttcctatgtcagcattggatgggcgagagaccgatttttacaagctgtcagaaactaaagggtgtcaaaccgtaacttctggaaaggtgcgccatggagctctcacatgcctgtgtgtggctatgaaaaggcaggtcctctgttatgaactatttcagagcaagacccgtcacagaaaatttaaagaaattcaagtcccatataatgtccagtggatggcaatcttcagtgaacaactctgtgtgggattccagtcaggatttctaagataccccttgaatggagaaggaaatccatacagtatgctccattcaaatgaccatacactatcatttattgcacatcaaccaatggatgctatctgcgcagttgagatctccagtaaagaatatctgctgtgttttaacagcattgggatatacactgactgccagggccgaagatctagacaacaggaattgatgtggccagcaaatccttcctcttgttgttacaatgcaccatatctctcggtgtacagtgaaaatgcagttgatatctttgatgtgaactccatggaatggattcagactcttcctctcaaaaaggttcgacccttaaacaatgaaggatcattaaatcttttagggttggagaccattagattaatatatttcaaaaataagatggcagaaggggacgaactggtagtacctgaaacatcagataatagtcggaaacaaatggttagaaacattaacaataagcggcgttattccttcagagtcccagaagaggaaaggatgcagcagaggagggaaatgctacgagatccagaaatgagaaataaattaatttctaatccaactaattttaatcacatagcacacatgggtcctggagatggaatacagatcctgaaagatctgcccatgaaccctcggcctcaggaaagtcggacagtattcagtggctcagtcagtattccatctatcaccaaatcccgccctgagccaggccgctccatgagtgctagcagtggcttgtcagcaaggtcatccgcacagaatggcagcgcattaaagagggaattctctggaggaagctacagtgccaagcggcagcccatgccctccccgtcagagggctctttgtcctctggaggcatggaccaaggaagtgatgccccagcgagggactttgacggagaggactctgactctccgaggcattccacagcttccaacagttccaacctaagcagccccccaagcccagcttcaccccgaaaaaccaagagcctctccctggagagcactgaccgcgggagctgggacccgtgagctgcctcagcactgggacctctcgctctccgctccctgccactcgcctcctctcactttcatctcttccctccacctcgcctgctcggcctgaaagccaccaggggctggcagcagtagcaggacagggattcaggagttctgacgacacgactctcagatccacgcccccagcctaacagcaacaacaaagacagactttccgtagcagcttagattaacgttgatttcattccatgcacttagagttgctttcagtaacattttacccctactcccaaaggtagcttaaatagacagattacacaaatgtaagtgataagaataagattagacagattttgctttcacagtagagtctcattatagtcctaaaatagctcatgggcttctccgcatccagaagggagaattggtccctggagtggctcactaagctcttaatcagcaaacgcagtgagtatcaacctgattgttgccaggaaatccttatgaattaaaacaatgcatattttactacagtacagagtttaaatgaatacataaatgtagaagtactgaatgtatatatttaaaaggagcctcttgtattcaacaaaagatggatgcatatataagagagatgatttaatttaaagaaatatgttgtttcttgtctgtaatgtaatgtaaagggtggaaaggcctcaagctcacatttgtagagagagagcgagagaaatcagagttccctttattgccctgtcctcaaactggtcataggctctagtcacctggggagctgtagaaaacacttgcagagccaggttttgctggtttggggcatgccctgggcaccagagctttaacatttgaagccacttcagcagcagcagcaaaaggcgaactcatctctacccaagatgtttcttttcctagtggtggaatttgaacacttctcactttttattgtattttatcttccgcagataaatgtagaaatacacgattctgtcacctctgatcccttccatctgaaaggttacaaggagtgttgtagcttctgaaggtgcagaaaacaatttctaaaaatgcttttattcctgggctaatcctgtccctccctaagtcacagcgaggtgtctgtcccagggctggagatgcttcccaaggaggagtctgttttgttgagagtgggcgtgggcttcttcacataagcctggggaaggaagaaaaaacggctttcattaccaaataatgtaaaacctcaaaagcaagggcttcaacagccttaaccaaatattattccccatagccagtggaaaatggatgtgacaaccccagtgcgcaggccagagtgagtgagcccagcacggcgctccgactggcttcctctctcaggtgctggattgtggggttagtggcatttccagctggattcctcctgttgtagttgccataaggaaatgagatgcagaatcagaaggatctatttctacagaatcatttcaccagttaagcacatgagtagagaaagagataaaaataaaagtatctcatgaaggaaagagattttgcctctcttttacttttcacctaagtttctctgagaaatagagacaggattctctctttaaaattcagtgaaaatgaagaaagttttcctgcagttgctaacctgagttgcagtgtttaaggccatcatttcactgctgctgtctgtgactccacgtctgtgtcactgaggtgacctgcgtgtcactgaggtggccaccatgctggcctgcggcatgtgcagggagctgaggctgtttccaggtgatgctgctgtgtggagaaggttctgagatgcagtgagggaagaaaggatcctgctggggattccattgtaagcacctataatcgggaattttcatgtaacagctttgacatttaaa

SEQ ID NO: 129 - DNA, 1926 bp, Homo sapiens
ggaaagactatgttttaggtgacccgtgtggcctttttgttgaggcctttaggatacaaggcccccacctaaagacgcgaccctcccgtaggaggggggcagggcccgggggcgggagcacagcggggccccagcctcaggcggcgcgtcactgagcacaaaggagacaacagcgaggcggcagcgggcgctgatcttcgctcgccagccactcgcaattgcggttacagacctgcagctccccctcccccagccggcccgcccgcctttctgtctcctctctccctccgtactggacggccccggtccatttccgggctccggatatttggtatcgattggggccggggacgcggagcaggtggccgcggcggggcagctgggccgccagcttggtgcctcggggaccgtctcccgctgctttggtcaccagcccctgcccgcccgacccgctccgttctccggcctgcgagccctgccggccggactttgcgccgcgtccggcgctgctgctgcgctcggggccccgctcggcgccggcggtgaccgggaagcccgcgttaaaggggcaaccgggaccctggcccggtatggctgaagtcagcatcgaccagtccaagctgcctggagtcaaggaagtatgccgagattttgctgtcctggaggaccacaccctggctcacagcctgcaggaacaagagattgagcatcatttggcatcgaacgttcagcggaaccgtttggtccagcatgatctccaggtggctaagcagctccaagaggaagatctgaaagcgcaggcccagctccagaagcgctacaaagaccttgaacaacaagactgtgaaattgctcaggaaattcaggagaagctggctattgaggcagagagacgacgcattcaggagaagaaggatgaggacatagctcgccttttgcaagaaaaggagttacaggaagagaaaaagagaaagaaacactttccagagttccctgcaacccgtgcttatgcagatagttactattatgaagatggaggaatgaagccaagagtgatgaaagaagctgtatctactccatcacgaatggcccacagggatcaggaatggtatgatgctgaaattgccagaaaactgcaagaagaagaacttttggctacccaggtggacatgagagccgctcaagtagctcaagatgaagaaatcgctcgacttctaatggctgaagaaaagaaagcttacaaaaaagccaaggagcgggagaaatcatctttggacaaaagaaagcaagaccccgagtggaagccaaaaacagctaaagcagcaaattccaagtcaaaagagagtgatgaacctcaccattctaagaatgaaaggccagcacggccaccaccacctatcatgacagatggtgaagatgcggattacactcattttacaaaccagcagagttccacacggcatttctcaaaatcagagtcctctcataaaggttttcattacaaacattaaaaacctaggaatctgccttgaaaatggactcactatagcaaatattactgggtgatacagaatgaattctacacttactttttttctcctgtgtttgcattcctgggatttatcctcaagtgcatttctgaccataagtaattttaattcatttcaaatgttttggttattcatgatcacttgggcagtataagaaaatgtagcttctgaatattggccacctctatgctgcatatacttcttgggatatagtatctaagacctttgtaaactgccattttgttaggtatggagtttggtatctagggagtaggccttatttagcaattcaaattttatggagatgaatgatcaaagtgaaacaatgtttggatgcaacgcagaataaaagaatataagaaatagctttttgttg

SEQ ID NO: 130 - DNA, 2689 bp, Homo sapiens
agttctcttcaagtcatgtaatcgacttttttgaattagttttcagtttcattttgttttccctaattcaagttgggaacacttcattttccccaattcaagttgggaacacttccttggtatttccttgctacatggactttagcaaatgctactttactctccttccagctactcaggaggctgaggcaggagaatcgcttgaacccgggaggcggaggttacagtgagccttttcctagttttactgttggaagcctaactcacaggagagattatgcaatacagtcctgaagtcaaggaaggagagcatgtaggagaatactaaccctgcacagattgtgatggtgatgtggaatatactaaagcctagaacgcacctcctctgcatgactaatatgttctgcacaagacatgaaggcacagacagcactgtctttcttcctcattctcataacatctctgagtggatctcaaggcatattccctttggctttcttcatttatgttcctatgaatgaacaaatcgtcattggaagacttgatgaagatataattctcccttcttcatttgagaggggatccgaagtcgtaatacactggaagtatcaagatagctataaggttcatagttactacaaaggcagtgaccatttggaaagccaagatcccagatatgcaaacaggacatcccttttctataatgagattcaaaatgggaatgcgtcactatttttcagaagagtaagccttctggacgaaggaatttacacctgctatgtaggaacagcaattcaagtgattacaaacaaagtggtgctaaaggtgggagtttttctcacacccgtgatgaagtatgaaaagaggaacacaaacagcttcttaatatgcagcgtgttaagtgtttatcctcgtccaattatcacgtggaaaatggacaacacacctatctctgaaaacaacatggaagaaacagggtctttggattctttttctattaacagcccactgaatattacaggatcaaattcatcttatgaatgtacaattgaaaattcactgctgaagcaaacatggacagggcgctggacgatgaaagatggccttcataaaatgcaaagtgaacacgtttcactctcatgtcaacctgtaaatgattatttttcaccaaaccaagacttcaaagttacttggtccagaatgaaaagtgggactttctctgtcctggcttactatctgagctcctcacaaaatacaattatcaatgaatcccgattctcatggaacaaagagctgataaaccagagtgacttctctatgaatttgatggatcttaatctttcagacagtggggaatatttatgcaatatttcttcggatgaatatactttacttaccatccacacagtgcatgtagaaccgagccaagaaacagcttcccataacaaaggcttatggattttggtgccctctgcgattttggcagcttttctgctgatttggagcgtaaaatgttgcagagcccagctagaagccaggaggagcagacaccctgctgatggagcccaacaagaaagatgttgtgtccctcctggtgagcgctgtcccagtgcacccgataatggcgaagaaaatgtgcctctttcaggaaaagtataggaaatgagagaagactgtgacaactcatgacctgcatccttaatatccagtgacttcatctcccctttcttcaccacaattccaggcaatggcctgtcggaccagacaattctaccactgcaaagagttgtaaccattttctggtatcacatttatttttcaagacatacttttcaagacatcattcactgacccactacctgcattgagtataaatgcctggatgttaaggattccaatttaactttgaaaagaactgtctcattcatttacatttctgttacagtcagcccaggaggttacagtgagctctccactaagaatctggaagaaatgcatcactaggggttgattcccaatctgatcaactgataatgggtgagagagcaggtaagagccaaagtcaccttagtggaaaggttaaaaaccagagcctggaaaccaagatgattgatttgacaaggtattttagtctagttttatatgaacggttgtatcagggtaaccaactcgatttgggatgaatcttagggcaccaaagactaagacagtatctttaagattgctagggaaaagggccctatgtgtcaggcctctgagcccaagccaagcatcgcatcccctgtgatttgcacgtatacatccagatggcctaaagtaactgaagatccacaaaagaagtaaaaatagccttaactgatgacattccaccattgtgatttgttcctgccccaccctaactgatcaatgtactttgtaatctcccccacccttaagaaggtactttgtaatcttccccacccttaagaaggttctttgtaattctccccacccttgagaatgtactttgtgagatccaccctgcccacaaaacattgctcttaacttcaccgcctaacccaaaacctataagaactaatgataatccatcacccttcgctgactctcttttcggactcagcccacctgcacccaggtgaaataaacagctttattgctcaaaaaaaaaaaaaaaaaaaaaaaaaaaaaa

SEQ ID NO: 131 - DNA, 2065 bp, Homo sapiens
aacagcaatggcggaaggagaagatgtgccgccgctgccaacgtcgagcggcgacggctgggaaaaagatcttgaagaagctctggaagcaggaggttgtgatcttgaaacgttgagaaatataattcaaggaagaccgctgcctgctgatctgagggccaaagtttggaagattgctctgaatgttgcaggaaaaggtgattgtttggcatcatgggatggtattttagacttgccagaacagaacactattcacaaagattgcctgcagtttattgaccagctttcagtgccagaggagaaggcagcagaattacttttggatattgaatctgtaattaccttttattgtaaatcacgtaacattaaatatagcacatcccttagctggatacatctactgaaaccattggtgcatcttcaactgccacgcagcgatttatacaactgcttttatgccataatgaataagtacattcccagggattgttcccagaaagggagaccatttcatcccttcaggttgctcatccaataccatgagcctgagctttgttcttatcttgatacaaagaaaattactccagactcctatgcactcaactggcttggaagtctttttgcatgttactgttccactgaagtcactcaggcaatatgggatggatatctacaacaagcagatccattttttatttatttcttaatgttaattatccttgttaatgcaaaagaagttattttaacacaagagtcagacagcaaagaagaagttatcaagttcttggaaaatactccatccagtctgaatatagaagatatagaagaccttttctctctggctcagtattattgcagcaaaacaccggcttcttttaggaaggataatcaccatctctttggtagtactttgttgggaattaaggatgatgatgcagatctgagtcaggctctttgtctggccatctccgtgtcagagatccttcaagcgaatcagctacaaggggaaggagtccggttctttgtggtggattgccgtcctgcagaacaatataatgctgggcatttatcaactgctttccactcagattcagacctgatgcttcagaatccatctgagtttgcacagtcagtaaaatccttgctggaagcacagaagcagtccattgagtctggctccatagctggtggggagcacctctgttttatgggcagtggcagggaggaagaagacatgtatatgaacatggtcctggcacactttttacagaaaaacaaagaatatgtgagtattgccagtggaggatttatggcactgcagcagcacctggcagacattaatgtggatggaccagaaaatggatatggccattggattgctagtacctcaggctcaaggagcagtatcaattctgttgatggtgaatctcctaatggctcaagtgatagaggaatgaaatcactagtaaataaaatgactgtggctttgaagacaaaatccgttaatgtcagggaaaaagttatcagttttatagagaatacatcaactcctgtggatcggcatgtgagcagcagtgacagagtgggcaagccttaccgtggcgtaaagcctgttttcagcattggggatgaagaagaatacgacacagatgaaattgacagttcttcaatgtcagatgatgatagaaaagaggttgtaaacattcagacttggataaacaaaccagatgtcaaacatcattttccttgtaaagaagtaaaagaaagtggacacatgtttcccagtcatctgttggttactgcaacacatatgtactgtttaagggagattgtttcacggaaaggattggcttatatacagtctcgacaagcgctgaattctgtagttaaaattacatccaaaaaaaaacatcctgaactcattaccttcaagtatggaaatagcagtgcttcaggaatagaaatcttggcaatcgaaaggtatttgattccaaatgcaggggatgcaactaaagccataaaacagcagatcatgaaagttttggatgctttggaaagttaatat

SEQ ID NO: 132 - DNA, 2725 bp, Homo sapiens
gttacgcgcagccccgcccccgcggcctcgtcgctcctgctgaggcggtagccgcttttcgtcgactcttaccggttggctgggccagctgcgccgcggctcacagctgacgatgggggaccccagcaagcaggacatcttgaccatcttcaagcgcctccgctcggtgcccactaacaaggtgtgttttgattgtggtgccaaaaatcccagctgggcaagcataacctatggagtgttcctttgcattgattgctcagggtcccaccggtcacttggtgttcacttgagttttattcgatctacagagttggattccaactggtcatggtttcagttgcgatgcatgcaagtcggaggaaacgctagtgcatcttccttttttcatcaacatgggtgttccaccaatgacaccaatgccaagtacaacagtcgtgctgctcagctctatagggagaaaatcaaatcgctcgcctctcaagcaacacggaagcatggcactgatctgtggcttgatagttgtgtggttccacctttgtcccctccaccaaaggaggaagatttttttgcctctcacgtttctcctgaggtgagtgacacagcgtgggcatcagcaatagcagaaccatcttctttaacatcaaggcctgtggaaaccactttggaaaataatgaaggtggacaagagcaaggaccaagtgtggaaggtcttaatgtaccaacaaaggctactttagaggtatcctctatcataaaaaagaaaccaaatcaagctaaaaaaggccttggggccaaaaaaggaagtttgggagctcagaaactggcaaacacatgctttaatgaaattgaaaaacaagctcaagctgcggataaaatgaaggagcaggaagacctggccaaggtggtatctaaagaagaatcaattgtttcatcattacgattagcctataaggatcttgaaattcaaatgaagaaagacgaaaagatgaacattagtggcaaaaaaaatgttgactcagacagactcggcatgggatttggaaattgcagaagtgttatttcacattcagtgacttcagatatgcagaccatagagcaggaatcacccattatggcaaaaccaagaaaaaagtataatgatgacagtgacgattcatattttacttccagctcaaggtactttgacgagccagtggagttaaggagcagttctttctctagctgggatgacagttcagattcctattggaaaaaagagaccagcaaagatactgaaacagttctgaaaaccacaggctattcagacagacctactgctcgccgcaagccagattatgagccagttgaaaatacagatgaggcccagaagaagtttggcaatgtcaaggccatttcatcagatatgtattttggaagacaatcccaggctgattatgagaccagggcccgcctagagaggctgtcggcaagttcctccataagctcggctgatctgttcgaggagccgaggaagcagccagcagggaactacagcctgtccagtgtgctgcccaacgcccccgacatggcgcagttcaagcagggagtgagatcggttgctggaaaactctccgtctttgctaatggagtcgtgacttcaattcaggatcgctacggttcttaatactgaagtcatgatgtgtatttcctggagaaattcctctttaaatgaacaagtaaccacatctcaggcggcagtgaagtccagatagttttgcagattgttttgctactttttcatatggtatatgtttctgatttttaatatttcttttgagaaattctgagttctgatgtaggagctttcctgtgatttctgtttcacgttccttcctgtcacaccctcctttggcgtctctgtgtatatccttgctttattttcttggaacctttgatttcaacactgagggcctggagacctcggctcctcctgctcctgaaccaggaggcttcatgtgggggaggaggagaggtctccatgtgacacatgggctcagggctgccagaatcagcggatgctggatgggcctgcagaaacaacactcaccacacacacttccttcaaaagaccaaaagtgactggtgtctcgtgtgacagattgcttcatttatgtttctacatagtaaggtgactgccaaataatatttgaagtcatctgtctctttgtaaattattttatatgacctataaatttaaaaatgtttttcagtgagtgcttttaacaaacttaagcttctgccctgccaagggaattaatgttatcttgtgaaaggtgttgctgtttgaattgatgagaaatggaagatgagaactccctaagagttctcataataaatcatctcatcacaaatcaatacggtatacagagttaaagtggaatgaggtaagaagatacagctacagaaaatagttgcgtgtatgggagaacagtcattgtaattgggtagttttgttaataaatatttttaaatcttgcttttcagaaattaccgaatgtgtataaacaaataaagaaaaataatttagctgtgttttagacagcattagaatatattgttcagcacagtaaaatatatttgaaatttgataagccaaaaatgtggttttgaatgaatattttgtgaatctttcttaaaagctcaaatttgtagacttctaaatagaataaacacttgcagcagatgg

SEQ ID NO: 133 - DNA, 2005 bp, Homo sapiens
cgcgccatggggcgagccgggggcgggggcccgggccgggggccgccgccactgctgctgtttctgggggccgcgctggtcctggcctctggggccgtgccggcgcgtgaggcgggcagcgcggttgaggccgaagagctggtgaagggcagcccggcgtgggagccgcctgccaacgacacgcgggaagaagccggcccaccagcggctggggaagatgaggcgtcgtggacggcgcccggtggcgagctggccgggccagaagaggtgctgcaggagtcggctgcggtgaccggcaccgcctggctggaagctgacagcccaggcctgggaggagtgaccgcagaggcgggcagcggcgatgcccaggcccttccagctacgctccaggctccccacgaggtcctcgggcagtcaatcatgccccctgccattcctgaggctacagaggccagcgggccaccctcccccacccccggcgacaagctgagcccagcttctgaactccccaaggagagccccttggaggtttggctgaacctggggggcagcacacccgaccctcaagtgccagagctgacttacccatttcagggcaccctggagccccaaccggcatcagatatcattgacatcgactacttcgaaggactggatggtgagggtcgtggcgcagatctggggagcttcccagggtcaccaggaacctcagagaaccaccctgatactgagggagagaccccttcctggagcctgcttgacttatacgatgatttcacccccttcgatgaatctgatttctaccccaccacatccttttatgatgacttggatgaagaggaggaggaagaggaggatgacaaagatgcagtaggaggtggagacctagaagatgaaaatgagcttctagtgcccactgggaagcctggtctggggcccgggacaggccagcccaccagtcggtggcatgctgtccctccacagcacactctggggtcggtccccggcagcagcatcgccctcaggccccgcccaggagagccaggcagggacttggcctccagtgaaaatggcactgagtgccgcagtggctttgtgcggcataacggctcctgccggtcagtgtgcgacctcttcccaagttactgtcacaatggcggccagtgctacctggtggagaacataggggccttctgcaggtgcaacacgcaggactacatctggcacaaggggatgcgctgcgagtccatcatcaccgacttccaggtgatgtgcgtggccgtgggctcggctgccctcgtcctgctcctgctcttcatgatgacggtgttctttgccaagaagctctacctgctcaagacggagaataccaagctgcgtaggaccaacaaattccggaccccatctgagctccacaatgataacttctccctctccaccattgccgagggctctcacccaaatgatgatcctagtgctccccacaaaatccaggaggttctcaagtcctgcctgaaagaggaggagtcatttaacatccagaactccatgtcgcccaaacttgagggtggcaaaggtgaccaggctgacttggatgtgaactgtcttcagaataatttaacctaaagcagagcaagaagagaggaagcgggggtagtgggtggggggtaggggaagaaacattatctcctcttgtacagagtctatttcttgtaaccatttgttaaactcttttctttttctgatctcatggcatgcttttatgtattttgtacaggaggcaaaaaaatacttaaaataagcaaagaaactgaacagaattgcatacattgggttgttttttctgtgctgtctgtacattgcttctgctgctgtgatttctaaacctgtgctgttattcaactgacttttttttgtactttgacccacgtttttttgaaataccagtaaaaaacaaagttcttgaaataaaactttttaaaaagttaaaaaaaaaaaaaaaaaa

SEQ ID NO: 134 - DNA, 2676 bp, Homo sapiens
ctctctaggctgccgggcgctggtcgtcagcgccgaggctgggctgaggcgccgcggtaccatgaggcgccggtacttaagagattatggcatcagaaacccacaatgttaaaaaacggaacttttgtaataagattgaggatcatttcattgatcttcctagaaaaaagatctctaatttcactaataagaacatgaaggaggttaagaaatctccaaaacagttggctgcttacataaatagaacagttggacaaactgtgaaaagcccagataaacttcgtaaagtgatctatcgcagaaagaaagttcatcatccctttccaaatccttgttacagaaaaaaacagtcccctggaagtgggggctgtgacatggcaaataaagaaaatgaactggcttgtgcaggccacctgcctgaaaaattacaccatgatagtcgaacatatttggttaactccagtgattctggttcttcacagacagaaagcccatcatcaaaatatagtgggtttttttctgaggtttctcaggaccatgaaacaatggcccaagttttgttcagcaggaatatgagattgaatgtagctttaactttctggagaaagagaagtataagtgaacttgtagcttatttgttgaggatagaagatcttggcgttgtggtagattgccttcctgtgctcaccaattgtttacaggaagaaaaacaatatatctcacttggctgctgtgttgacttgttgcctctagtaaagtcactacttaaaagcaaatttgaagaatatgttatagttggtttaaactggcttcaagcagtcattaaaaggtggtggtcagaactatcatccaaaacagaaattataaatgatggaaatattcaaattttaaaacaacaattaagtggattatgggaacaggaaaaccatcttactttggttccaggatatactggtaatatagctaaggatgtagatgcttatttattacagttacattgagagatttcatctactaaagagcatttggtttttcaaaacatccctgaactgtataatttacaaaaaaaaaagtctcgtctgagaactgtgaactgtggaagaaatcaaaactattttttcttttaaaaagccacgtaatgaaaccactaatgaaatcccagcaatctgcttcacattgaagtggaaaaatatccaaaaggagcagcttcaatttcattgaggtgaaagtgcactatgaagattgttcacctttgctgcatttgggagttatatggttatttggtaacattaagaactactggattttaatgcaatcctgcataaaaatataatttatactatgtgaaaaaataagacaggacttaccactaggaaccaccaagaccaatcatcattaacttttttaagattgtgttttattaaaaaaaaaaaacacttaaatgtgtgcagctattttcttatgttgaaaagactgaaagtttaaaacatgaaaaaaatcaatattaaacattttttgttcacactgagatactgtgtatgtaaaatgccttaattattaataagccaatgtgttatgataccaatatctgttttaaaaaactaaaaccaaccatgcttctggcatgataaaatcatggaattaaatcaggggtttacattcttgtagagtgttcttgaaacactctctgcaccatttttaaaacttgagaatagttttagtatctctgatattttttgccagaatcatcatgtcatgtatgaatgtgttatccctatctaaggaaaaaggtgaatatgtttttgtatgaatgtttaactggaaatgtccatggacttggctaatttatatttactttttattgtacatagatttctaatatttttcattcctgtatcatttaaacttccttcatttgagtaaattcactaaatatttctatttttttgcttttttaaattctgattttatatgaattctaattctttttcactacatatgttttaaagagttacatacagtgatttagaatggtttacagttaatgctgatcttgtattttaaattccaacactttgtgtcactacctcctctaatggttagtatgatatgctagcagactgtatgaggtctttttttaaaataccacttttagtgtcagtgaaccaaattctggaatgtcttaacagctctaaatcttacttgtcttgaaaatgattggggtttaataccactgctggtggttcacacatcatcccatccttaatatgcctgacaggcatctgagcaaaggtttttagtaattgaatttctctgcagtagtccttcaagcacttgaatgtaaacctttagcatttattcgtttaatgactactgatacgaatctcaagcagatttcttgctcttaaaagttatgtttcactgagttctggttttgtgtagctatattttatatagctagatattcctcacagtgaacatgaattgtaataattggttatttccttaagtctttagattataataatttcagattattgcacgtctgtgatttgagaggtgagttatttaagaggccagttttcaggacatgggaatttgaattgtaaacctgttatctctgtgaaacttttaacatgataaaatataacctttctttgtgcttaaaaaaaaaaa

SEQ ID NO: 135 - DNA, 1285 bp, Homo sapiens
tcccccatcccagcccgccccctcggccgctccgcgtccctggcgtgactcggcactgagagtcccgggagaagactcggcggtcgcacctcttctgtccaggcctcggccttcctgagcatctctccttcctctcccagatcgtcttctccttcagtttcaaagccagtggcgtcgcggccaccctgccgggctctctgtgaggatggtgggggtgaagcccgtcgggagcgacccggatttccagccagagctgagcggcgcgggctccagactcgccgtggtcaagttcaccatgagagggtgtgggccatgtttgaggattgccccagcattcagttctatgagtaataaatatccacaggctgttttcttggaagtcgatgtacatcagtgtcagggaacagctgccaccaacaatatatcagcaacacctacatttttgttttttcgaaacaaagtgagaattgatcaatatcaaggagcagatgctgtgggattagaagaaaaaatcaagcagcacttagaaaatgaccctggaagcaatgaggacacagatattccaaaaggctatatggatttaatgccttttattaacaaagctggttgtgaatgtcttaatgaaagtgatgagcatggatttgacaactgtttacgaaaagacacaaccttcttggaatctgactgtgatgaacagctgcttattactgtggcattcaatcaacctgttaagctttattccatgaaatttcaagggccagataatggtcagggccctaaatatgtaaaaatttttatcaacctaccccgatctatggattttgaagaggcagaaagaagtgaaccaactcaagctctggaactgacagaggatgatattaaagaagatggcattgttccacttcgttatgttaagtttcagaatgttaacagtgtaactatatttgttcagtcgaatcaaggtgaagaggaaacaacaagaatttcatattttacttttattggtactccagtccaggcaacaaatatgaatgacttcaaacgagtagttggcaaaaaaggagaaagccactaaggtacaaaagacactggacaaccatattgcaatcagatctacagctcctggataattgcttgattctcgccagagactgtcaatgtttcattcattgccattaccaataaatcattgcttttgttcagatggtatcactagtgtttccattgtaatcttgacacatgcaattgtaaataaaagtcaccacttttgccaagcttaaaaaaa

SEQ ID NO: 136 - DNA, 2415 bp, Homo sapiens
gcaagcctgggccgctcctccttccctcaagcagcccgacggccatggaggctgaagagacgatggaatgccttcaggagttccctgaacatcataaaatgatcctcgaccgattgaatgaacagcgagagcaggaccggtttactgacatcaccctaattgtcgacggacaccattttaaggctcacaaggctgttttggctgcttgtagtaagttcttctacaaattctttcaggagtttacccaagaaccattggtggagatagaaggtgttagtaaaatggcctttcgccatttaattgagttcacatatacagcaaaattaatgatacaaggagaagaagaagccaatgatgtatggaaagcagcagagtttctacaaatgctagaagctatcaaagcccttgaagtcaggaacaaagaaaactcagctcccttagaggaaaataccacaggaaaaaatgaggccaaaaaaaggaagattgcagaaacttcaaatgttatcactgagtcattgccatctgcagaatcagaacctgttgaaattgaggtagagattgccgaaggcaccattgaagtggaagatgaaggcatcgaaacattagaggaagtggcttctgccaagcagtccgtaaagtacatacagagcacaggttcctctgatgattctgctctagcactgttggcagatattaccagcaagtaccgtcaaggtgacagaaaagggcagattaaagaagatggctgtccatctgaccccacgagcaaacaggagcacatgaaatcacactccactgagagtttcaagtgtgaaatatgcaataaacgatatcttcgagagagcgcatggaaacagcacctaaattgttaccaccttgaagaaggtggagtcagtaagaagcaaagaactgggaaaaaaattcatgtatgtcagtactgtgagaaacagtttgaccattttggacattttaaagaacatcttcgaaaacatacaggtgaaaaaccttttgaatgtccaaattgtcatgaacgatttgctagaaatagcactctgaaatgtcacctcactgcatgccaaactggagtaggggcaaaaaaaggaaggaagaagctctacgaatgccaggtctgcaacagtgtgtttaacagctgggaccagttcaaagatcacttggtaatacacactggagataaacccaaccattgtactttatgtgatttgtggtttatgcaaggaaatgaattaaggaggcatctcagtgatgctcacaatatttcagagcgtctagtaacggaagaagttctttcagtagaaacacgtgtgcaaactgaacctgtaacatcaatgactattatagaacaagttgggaaggtgcatgtgctaccattgcttcaggttcaggtggattcagcacaagtgactgtggaacaagtccatccagatctgctccaggacagccaggtgcacgattcacacatgagtgagcttccagagcaggtccaagtgagttatctagaagtgggccgaattcagactgaagaaggtactgaagtacatgtagaggagctgcatgttgaacgggtcaatcaaatgccagtggaagtacaaactgaacttctagaagcagatttggaccacgtgaccccagaaatcatgaaccaagaggagagagagtctagccaagcagatgctgctgaggctgccagggaagatcacgaagatgctgaggatttagagaccaagccaacagtggattctgaagcagaaaaggcagagaatgaggacagaacagctctgccagttttagaatgaaattacacatgaatatatttttaaatttacttgttgggtttttgaactgattatgggcagtttgactgtccttaattaagcctaacagacaagtggaccaaagttaagctgtttcctgttgtgctgaactgttgtccgttgaaacacattgattcccctccccctacttattgccacagaggagggatcttttccataactgaaggggagttttgagaagtatatttctggaaacttaaatggattatattcttattatatagttgggtacgaatgtatctattttcattgtggtaaaagttcttccttttctctttcccaggtcatgttcttcctcaaattttttccatattgtaaaatcaaacttaaatcattagaatacaagtttatgtattctaatgcatgttagaaaattgaataatataggaaacacaaggctgcatgatgaaaagtgcattgttactgtgcagttaaattttggcttctggctttctttagtttgaacaaacgttcttgtctaccccagtagtcacagatgccatctttgcaacagaaagagtggtggtggcaaaatttctagaatgttaaaaaaaaaaaaaaa

SEQ ID NO: 137 - DNA, 1561 bp, Homo sapiens
ggcccgctccaacatcagaatggtaacagctttcaggagcctaccacgcggcagctccggagctgccgcgtccatgtccgcgcacaatcggggcaccgagctcgaccttagctggatctccaaaatacaagtgaatcacccggcagttctgaggcgtgcggaacaaatccaggctcgcagaaccgtgaaaaaggagtggcaggctgcttggctcctgaaagctgttacctttatagatcttactacactttcaggtgatgatacatcttccaacattcaaaggctctgttataaagccaaatacccaatccgggaagatctcttaaaagctttaaatatgcatgataaaggcattactacagccgccgtttgtgtttatcccgcccgggtgtgtgatgctgtaaaagcactcaaggctgcaggctgtaatatccctgtggcatcagtggccgctggatttccagctggacagactcatttgaagacacgattagaagagatcagattggctgtggaagatggagctacagaaatcgacgtggtaattaacagaagcttggtgctgacaggccagtgggaagccctgtatgatgagattcgtcagtttcgcaaggcctgtggggaggctcatcttaaaactatattagcgacaggagaacttggaactcttactaatgtctataaagccagtatgatagcaatgatggcaggatcagattttattaagacctctactggaaaagaaacagtaaatgccaccttcccggtagctatagtaatgctgcgggccattagagatttcttctggaaaactggaaacaagatagggtttaaaccagcaggaggcatccgcagtgcaaaggattcccttgcttggctctctcttgtaaaggaggagcttggagatgagtggctgaagccagaactctttcgaataggtgccagtactctgctctcggacattgagaggcagatttaccatcatgtgactggaagatatgcagcttatcatgatcttccaatgtcttaaatcagtcaccagttccagaaaagttctttacgacaatgtttaaaaattatttttctacgtaattgctaaaattatttaattaaaaaattgggcagtaggtaactggcattcctctctttaaaatttctaccgaacttaatggaatggaaaaagcaaactcatccacatgtggtactcatttcaggcacatctgaaatgatcttaattactagaagatctgcactattaactttgtgaagagtttctcctaaaaactttaagtaaaatgttaatggtagctttgataacatcaaattctaagggagaaaaaaacaatattaaaccgcccaagcagtgtgccctagcagaggaaaatgcaacatctcgcaagcgctgctgtaacgacttcaggagtcactgattcagcactaatttcctgctgtgaaaactcatctttcatttttgccgtggataggcgcttttattaattgttgtcctaatgaaatttctgacattgtcatatacaacgatgaatatcattaaaatttttaa

SEQ ID NO: 138 - DNA, 2077 bp, Homo sapiens
ccgagcgccagcgcggggaaccgggaaaaggaaaccgtgttgtgtacgtaagattcaggaaacgaaaccaggagccgcgggtgttggcgcaaaggttactcccagacccttttccggctgacttctgagaaggttgcgcacagctgtgcccggcagtctagaggcgcagaagaggaagccatcgcctggccccggctctctggaccttgtctcgctcgggagcggaaacagcggcagccagagaactgttttaatcatggacaaacaaaactcacagatgaatgcttctcacccggaaacaaacttgccagttgggtatcctcctcagtatccaccgacagcattccaaggacctccaggatatagtggctaccctgggccccaggtcagctacccacccccaccagccggccattcaggtcctggcccagctggctttcctgtcccaaatcagccagtgtataatcagccagtatataatcagccagttggagctgcaggggtaccatggatgccagcgccacagcctccattaaactgtccacctggattagaatatttaagtcagatagatcagatactgattcatcagcaaattgaacttctggaagttttaacaggttttgaaactaataacaaatatgaaattaagaacagctttggacagagggtttactttgcagcggaagatactgattgctgtacccgaaattgctgtgggccatctagaccttttaccttgaggattattgataatatgggtcaagaagtcataactctggagagaccactaagatgtagcagctgttgttgtccctgctgccttcaggagatagaaatccaagctcctcctggtgtaccaataggttatgttattcagacttggcacccatgtctaccaaagtttacaattcaaaatgagaaaagagaggatgtactaaaaataagtggtccatgtgttgtgtgcagctgttgtggagatgttgattttgagattaaatctcttgatgaacagtgtgtggttggcaaaatttccaagcactggactggaattttgagagaggcatttacagacgctgataactttggaatccagttccctttagaccttgatgttaaaatgaaagctgtaatgattggtgcctgtttcctcattgacttcatgttttttgaaagcactggcagccaggaacaaaaatcaggagtgtggtagtggattagtgaaagtctcctcaggaaatctgaagtctgtatattgattgagactatctaaactcatacctgtatgaattaagctgtaaggcctgtagctctggttgtatacttttgcttttcaaattatagtttatcttctgtataactgatttataaaggtttttgtacattttttaatactcattgtcaatttgagaaaaaggacatatgagtttttgcatttattaatgaaacttcctttgaaaaactgctttgaattatgatctctgattcattgtccattttactaccaaatattaactaaggccttattaatttttatataaattatatcttgtcctattaaatctagttacaatttatttcatgcataagagctaatgttattttgcaaatgccatatattcaaaaaagctcaaagataattttctttactattatgttcaaataatattcaatatgcatattatctttaaaaagttaaatgtttttttaatcttcaagaaatcatgctacacttaacttctcctagaagctaatctataccataatattttcatattcacaagatattaaattaccaattttcaaattattgttagtaaagaacaaaatgattctctcccaaagaaagacacattttaaatactccttcactctaaaactctggtattataacttttgaaagttaatatttctacatgaaatgtttagctcttacactctatccttcctagaaaatggtaattgagattactcagatattaattaaatacaatatcatatatatattcacagagtataaacctaaataatgatctattagattcaaatatttgaaataaaaacttgatttttttgt

SEQ ID NO: 139 - DNA, 11113 bp, Homo sapiens
ggctccgggggtggcggtcggacagtgtctagcacgctcagtccgggcttggggccccgcggcggagaaggaggtagagggggcggcggcggcggcggcggtggtggcggcaccatgtttcttcactcagttaatctctggaacctggcgttttatgtcttcatggtctttctggcaaccctggggctgtgggatgtcttcttcggcttcgaggagaataagtgcagtatgagctacatgtttgagtacccggagtatcagaaaatagaacttccaaagaaactggcaaaacgctatcccgcatatgagttgtatctttatggagagggatcctatgctgaagaacacaaaattctccctttgacgggtattccagttctctttcttcctggtaatgctggaagttataagcaagttcgttctattggctccattgcacttagaaaagcagaggacattgacttcaagtaccactttgacttctttagtgtgaacttcaatgaagaactggtggctttgtatggtggaagtcttcagaagcagaccaagtttgtacatgaatgtattaaaacaattctcaaactctataagggtcaagaatttgctccaaaaagtgtggcaataattggtcattctatgggtggccttgttgcaagagcattgcttacactgaaaaattttaagcatgatctgataaatcttcttattacacaagccacacctcatgttgctcctgtgatgccattagatcgtttcattacagatttttatacgactgtaaacaactattggattctaaatgctcgacacataaatttaaccacactttctgtagctggaggattccgggattaccaagttcgttcaggattgacttttctaccaaaattaagccatcataccagtgccttatctgttgtgagttcagcagtgcctaagacctgggtctcaacagaccacctctccattgtgtggtgtaaacaattgcagttgactacagttcgagcattctttgatcttattgatgctgatactaaacaaataactcaaaattccaagaagaaactgtcagttttgtatcaccactttataagacacccatcaaaacattttgaggaaaatccagctataatttctgacttaacagggacatctatgtgggttctagtaaaagtgtccaaatggacctatgtagcttacaacgaatctgagaagatatattttacatttcctcttgaaaatcatagaaaaatctacactcatgtctattgtcagagcactatgctggatacaaatagttggatttttgcttgcataaacagcacttctatgtgcctgcaaggggttgatttatcatggaaagctgaactgctgccaacaattaagtatctgacattaagacttcaagactatccatctttgtctcatcttgttgtttatgtaccatctgttcgtggaagtaagtttgttgtagattgtgaattctttaaaaaagagaaaagatacatacagcttcctgtaactcatcttttttcctttggattgtcttcaaggaaagtggtgttaaatacaaatggcctatactacaatctagagcttctgaactttggacagatataccaagcttttaaaatcaacgtggtaagcaagtgctcagcagtcaaagaagaaataaccagtatctatagacttcatattccttggtcttatgaagattcactaaccattgcacaggctccatcttccacagaaatttctctgaaactccatattgctcaaccagaaaacaatacccatgtggcattatttaaaatgtacacgtcatcagactgtcggtacgaggtgacagttaagacttccttttcacaaatacttggacaggtagttagatttcatggtggagctcttcctgcttatgtcgtatctaatatccttcttgcttatagaggacagttatattctcttttctcaacaggttgttgcttagaatatgctaccatgttggataaagaagccaaaccatacaaagttgatccttttgtaattatcattaagtttctgttggggtataaatggtttaaagaattgtgggatgtattattgttaccagaattagatgccgtcattttaacttgtcagagtatgtgtttccccctgatatccttgattctctttctgtttggaacgtgtactgcctactggagtggcctactgtcttctgcatctgtgagacttctttcttcattgtggctagctttgaaaagaccctctgaacttcctaaagatatcaagatgatatcaccagacttgccctttttgacaattgtcttgatcatagttagttggacaacttgtggagcactagccatacttctttcttatctttactatgtgtttaaggttgttcatctgcaagccagcttaacaacttttaagaatagccagcctgtgaatcccaaacactctagaagaagtgaaaagaaatccaatcatcataaagactcctcaatacaccatcttcgtttatctgccaacgatgctgaagatagccttcgcatgcacagtactgtgattaacttactaacatggattgtattactcagcatgccttctctaatttattggctaaagaatcttaggtattattttaaacttaatcctgatccatgtaaacctttggcatttatccttattccgactatggcaattcttggaaatacttacactgtttcaataaaatcaagtaaattgttgaagactacttcacaatttccacttcctctggctgttggtgtgattgcttttgggtcagcacatttatataggcttccatgctttgtcttcattcctcttttactccatgcattatgcaactttatgtaagattggacttaaggaatgatgaagataatttatgtgtttagggccagtgataagagggaacacacagatccatcagtatggacagcaagatcctttggagaagacaagtctatttttacaatattgaaaataggaaattagttttgtaatgtttgagggaagtagttgaagcatggttttgttttgtggtgtggaatccatgtagtaatcatttttgaaaaattcatgaagggatatatggtgatcactatcattgaggactcctgtgcatataaaatagtctgttttatcaactgtacgagaagtctgatatgagagatttagtagatgcagcattatttgcagtctcactgcaagcattctgctcatttcatcaaactttttttcacaaaagtaggttattttgaatttgctatagtttacctattaagaaataagtctttaaataactgatgaaatttatagctgtttggtttctcaaaggttaaatagccacagaaagcctttggttagtttttggcagccaccatgaacaaagtggatcttgtcttcttacatctatgaaaatagagctttgaatggtaaggagatatgttttcttggtaaccaatgcaagattgatgggtggaaacatgattcaaacttacacaatttttcttgctatttttcaaatatgaatcttactatatattctcggtgaacatcaggagactattaaagaggtctgctgttaaatgtaaagaaaaaatgctcgtagctatttgcttcctggtattggagcagttcagttgtttagtttataccattggattcaattcattgcaccatggttgccaaaagtgcctgaggtcataatggattgttaaaataactaaattccagtggttggaaactctaggtttgtaccattttttctgctgtgggaaaaaacaacaacaacaacatgatcaaggtaacatcacatttgatgtataatattatactattaatggaatatcagtagacaactgttaacccattagtagcatgagtataaacagtacacctgaataaattggagacattagccactaggtttaacagtggaatcttgatttgcctaggtgacttctgggattactgtttgacaaataagagtaacattttatttcatttcagaatttacgtcacttttagctacaagagtaggaagaaggtaatcggcaaggcagaagagtatactctttgccttaggatagcgtaaactcaggctgagacatacccggcttatagagttcttctagatgtgtagactgtaaatgcccaaatcctctcaactaaagttttagtgattccacaaagcctctcatgtaaatttccagtgattccaccattgcacttgtgaatatgtatccttgttagtacccagggatgtcctcgagcaccagttttattttatctgccattgcatctggattccattacagcctctcagctgttactgcctgtggacagttacttctgcttactgcctgtagagagttacctaacttctcttctcagttcttcctcaggtcctggctattttggcctcagttgaagggagtcttgctctcatctctgagggttttaagtttgtttgatcccattgttgtcttttctagctttgagcatgtttttcagtattcatattttaacttactgagaacattaaagggaaatgataaactcgtggtggggatatggcagacaggtgcttgtttgtttgagagaagtagcagaagagataaaatacaaagtgctatatgtttcagctggagaggaaagagagagaatttattagattatatacttgtcccatggcataccacgtatatgtttaaatagggacacatctccctatgtttaactatacttataaacaactttgatacacattgcgtcttttattctgtcacctgatattttagtgtatctcaagttacagattacatgtgtccttaaactatttctgaatttggacttagttccatatacagaaagaactttagaaaattcattaatttggatcttctattgatagccataaatattatgtttatgtattctaaaacctctttgtttagttagtactgttcatgaatgtaacaagcttcaatttctcatttgtgagtagtacatttgctttttgtttgtttgtttgtttgtttttgagatggagtctcacgctgtcaccaggctggagtgcagtggcgcgatttcagctcactgcaacctccacctcccaggtgcaagtgatgcccctgcctcagcctcccgagtagctgggactacagacacccgccaccacacctggctaatttttgtatttttagtagagacggggtttcaccatgttggctaggctggtctcaaactcttgacctcgtgatttgcccgcctctgcctccccaaagtgctgggattacaggcgtgagccaccacgcccagccgtacatttactttttaaagcagcagactaggtacactaattctcactcaaatattttcatgggaatgtagttatcaccaagtcctaaagtattatttatgccaaaaaaaatttcattttaaggactacaaaaatgattctaattaaacattttataatcaatagtaggttgggtctttagccattatatgtgtatatatacagacacatatgtatacacttacattttgacagggtcttcattgagtcttgatgcactttaaacccagctggctaccagagatgcgaaggtgggctctttgaagattagcaaaatggacgtttctgtcacttgagaaaaggaaagttctttgcctttaaattacacagttttcatcatgcccacaatctatattattggctggttaaacagcactgccctattagcaatgttaacaaaaatgaaattatttattggcggttatagattatctaattcaggaaatttctgagctcaacttttacagcaactgttatgccttctaatttagcaattgagttatgagtaagttttgtgcttaactcctagaccctattgttgataaccagatcaaatatagtctgtacagaggaaaacactgggaacatttagtatttctaaagcctcctttggagttactactgattgtaatttggaactgataataggtagagattgctaacactgttttttttcctggatcttttttatgccagaaattaaacaggttctgctaactcttttttttctcttggttatcaccagaatgaaaatatttaaagtgatgactctagaaaagccatctgtgcctggttaacattgagtttgagtctcttcaatatatattgatcatgtattgattaatctttattttttcatattttggctagacaaattcagatctatataatggaataccccttcttgagtgaactatactactaatctacatgattatatagtaaggaaaaaagaagaaataactgtaataggcatagtgtttgttgttggttgtcttgtcattcatgtgatactactcatttccaaaattcacacaaacttacatgaggtggattatttgttttgttcattatttagttcctatatgttttttctttagaaacagagtctcattctgtcacccaggctggagtccaatggggcggtcatagttcactgcagccttgaactctttggctcatgtgatcctcccatctcagcctcccacagcaggtgagactacaggtacatgccactgtgcctgactttttaatttttttgtagagacgaggtttcagtttgttgcccaagctgatcttgaactcctggtttcaagcgatcctcccacctcggcctcccaaagtagtgggatttcaggcatgaccacctggcctagttcctatacttttcttaattcttcagacttctcacatttagtatagtgcattcatttcatcttgctgtttattagcaccctttgtggccaagggaaataaaaggtggtaaaattcagttttcagtttagttcttgaaagctctgggaaatggaggaaacacaaaactatgaattaaactagggctgttgatttctgaacccccagataaatcagttgacccacattttcattttaggtgttaggtccaaattagcataatgtcttgcattattattaggttcagtgtgaaactttacagtgctgcatttgaagtttagtaactggttattattaatcatttgggaaaaatgaaaatgtgttgggactttctatgactaggcatttgttgattatttttcatgattgctttttgttttctcattgtgtaggatttgtgaacttgtatattacaggaaacaagatactttgtaaaatttactggggaaaatccatttggagtgcatgacatttgccaggataagaaagcagtaatatgtttgtattataaaattacaccctgccagaaaactttctttcctagtaaggtaaatgtagaagggacttttacagcatagtaagttgattaggagccaaaattttattccagtttttttttgaactaagaatgttttaaattctgtaatgaacttttatgtttacccattactcatgcattctttcacaatatgtttaatagcctgaggaaataggaaagctgtgaagctactaccattctttacttttaataagaataataggaaagaaaagtcaggtcagtaatccaaatccaaatatgtatactgcaaatgctcaagaagtcacattttttgataaattgtattgagtacagaagaacttatatgaatttattatctgttaataacttagttttgacaacagaataacatttggaaattgtgagaataatcaagctgtttttccattaacagtgtaaattcataacatgtccttcaaaaggtgatattctaagctgtcttaattgtctacggttgataacttttaaataaagtacaggactttctgaaagtgtttggcatgttatgctgccaaaaacaatctgtgttttgaaataccaattaatcagttaatttctgaagactttgtataggacttgatatatgagtcagaatctgtctgtactcattctgtacattgtaactttgaacacttatgaaaaactgtatctgttggtgtgttttgattagttagtgtagatttgtttgcgtatttgaattccgattttagtttaggaagactaaaagtagccatttttgtaaagttcatatgctattttttaatgtcatttttgtttttaatatttatacaatagtgatgttactagtaaaaaatgtttatagataacacgtagagctattaactgttcaaaagcctacatgataggcatattttgtatttcgtgttgcactcgttctgtttcatattggactttttacatcccttttttagcaaaaaaaagagacacatttgaattctctttagcataaagctgtgcattggaaactatgtgactgtatccatacggttagcaaaatactctttgccaccaaaggtaaatgaaactgtaaaatacctctggatatttgtgccaatgaacttttcttagcatattaggattaaagcaaaaataatcttttcagtatgtttcatctaggacttacaataaatgtttaaaccatgaaaacttatatttcataccctaatttttctttgaaaatattcaagatttgtagcctagtgtgttctattttgtgtgattgcttgaatgttttctgattttattgggtaaaagtttgcctagtaatgatctttcagcaattcattgaaataattatttgaagtaatcttgcttcagatttaatttgtgatgtacattgttgtacaagccattttagtacaggtgtctcatttatgtagttgaaaggtgactgtggaatttcttttgttttttatgtatttccattcagtctctttatatagtcacatgtttcacaggggaacttgtccactggaacctaacatagtacaaccttttaatatgcgtatcttaaaggaaaatattataaaacaagatattaatactaaagtgttaacattaatatgttgttctcatggaagaaaagtagaaaatgtgataggcttagaaattattttttatcagcattaagtgcttcaatttctccccataaagattctaaggaaatttcagttcctcatattatagttttccccataatttaatattactaagtatttctctgcccagtaatgttgatgcagtttgcataaatagccttggaagtaaggaggcaggacagaaagccaaatatcgaaatctctggccttgatttagtgacagtttattctaatggggaccataggtgttattagtaaaaagatagtgtacaaggcctaagttcagtttacattgttctttgaaatgagttcatcttttgtgttgaataattgtattctaagtaggagatgcctgtatttaacataatcatgctttctatataatcaaatatgtatttgttggaatactggtagaaataaccttcccttcctccactgtgcagtggaaaaaaaactcccgatttatactgtatataaattaggaaattatgttacatatttacatttttaaaaatataaaaatgacatattattttgaagtgattgtattatagtttctgaagcttatgactggctataaatataacaacatacccatgagaaaccagaccaaaattgaatatatatcatcactgtgaccttgaacttatagtcatttgggataaaacagagtgtgccttgaaatgataaagagtgccctgcaattttataactgtacattttattatgggtggtcctctcaaattggccccaaatccttgtcttcgaggttggtgaaataaaagtttaaaataaaagttgactggtatttcctttagtatttccagaactattgctgtagaggcctcccttaattttcagagttctcattttgaattaaagtagacttacgctacatagatgtagaaaattaggtttggcttaggtttctgaaaaaatattctaggagaaggtggtagcattgttctgaacttaccacacttggaaaaactaatcttcaaatgtaattttttgtcttattaatgagtaatctgtcaaagacatgaattctttgacttgtgctcattctttctgaacttattgaggcttatatatatcaaataaggttaatttacacaataattatttttaataattaataaactcattcatgtagtatattttaaaacattatttcctctcatttttccttctcttttttcttcctatatatttttaaggcttcaagagaaaacgggcttcagtttttaaaaaaatgtagacttgcatttttactgtgcttatttaaaataatggatataatttatattaaggtccaaattattttattcacaggataatcatggtctctgataaaagatgcccacatttctgtgtactcacagttgttgtatatttttcaatttcaattttgaaagtaaactcaacacattgttttcccattttacctccactacctactcgccagacaaaaatatagatttctctaaaaacacatacaaagaaaatgtctttccttaaaacatgatcttattgacatgaaggtagtttgagcaagggtatgtaataaaataaatggctctcaacctgcatcaatttttatactatagttaaaaaatttatagaggacaacctatgtgttatgctgagatagactcagtaatcatttgtttgcaaattgattatttttttctcatccatccagaaagtacagtgcataacaacaacacttaacaagtgcagaggaacctgtcctgtagtatataataaaaaatgattgtcaccttgctgatctttccatttaaacatgcatgatctccagtactttgtacaatgtatagtatattaaatacatttatgtgtaattttgtgtgtatttttatatggtataattaaaattattacatttatgtgattgtaattcacaaaaagtactacttactatattctgtagagtgtgttgtgaatgtttttacctgtgtttgagcattatggtgtaggtttaatagatgaatatttgccttcagtctctgctcaggtattaatgtgtagtaatttttggtgctttctttttaatctgtgataatctggtgttctgaatgttcaaaaataaatttggttgaatacgca

SEQ ID NO: 140 - DNA, 5880 bp, Homo sapiens
caatcccacagagtattgatgaggaaactgaagtttggagcgatcacatcattttcccaaggtaacacaagtggcaagacagccgggaacccctaccccatccccttattcagcacatgaaataaacaaggggcatccaaatcttgcggcaacgcccccgggacatgcatcgtcccctggactctctcaaaccccttatccctctggacagaatgcaggtccaaccacgctggtataccctcaaacccctcagacaatgaattcacaacctcaaacccgttctccgtttttccagaggcctcaaatacagcctcctagagctaccatcccgaacagcagtccttccattcgtcctggtgcacagacacccactgcagtgtaccaggctaatcagcacatcatgatggttaaccatctgcccatgccgtacccagtgccccaggggcctcagtactgtataccacagtaccgtcatagtggccctccttatgttgggcccccccaacaatatccagttcaaccaccggggccaggtcctttttatcctggaccaggacctggggacttccccaatgcttatggaacgcctttttacccaagtcagccggtgtatcagtcagcacctatcatagtgcctacgcagcaacagccgcctccagccaagagagagaaaaaaactataagaattcgggatccaaaccagggaggtaaagacataacagaggagattatgtctggaggtggcagcagaaatcctactccacccataggaagacccacgtccacacctactcctcctcagcagctgcccagccaggtccccgagcacagccctgtggtttatgggactgtggagagcgctcatcttgctgccagcacccctgtcactgcagctagcgaccagaagcaagaggagaagccaaaaccagatccagtgttaaagtctccttccccagtccttaggctagtcctcagtggagagaagaaagaacaagaaggccagacatctgaaactactgcaatagtatccatagcagagcttcctctgcctccatcacctaccactgtttcttctgttgctcgaagtacaattgcagcccccacctcttctgctcttagtagccaaccaatattcaccactgctatagatgacagatgtgaactctcatccccaagagaagacacaattcctatacccagcctcacatcttgcacagaaacatcagaccctttaccaacaaatgaaaatgatgatgatatatgcaagaaaccctgtagtgtagcacctaatgatattccactggtttctagtactaacctaattaatgaaataaatggagttagcgaaaaattatcagccacggagagcattgtggaaatagtaaaacaggaagtattgccattgactcttgaattggagattctcgaaaatcccccagaagaaatgaaactggagtgtatcccagctcccatcaccccttccacagttccttcctttcctccaactcctccaactcctccagcttctcctcctcacactccagtcattgttcctgctgctgccactactgttagttctccgagtgctgccatcacagtccagagagtcctagaggaggacgagagcataagaacttgccttagtgaagatgcaaaagagattcagaacaaaatagaggtagaagcagatgggcaaacagaagagattttggattctcaaaacttaaattcaagaaggagccctgtcccagctcaaatagctataactgtaccaaagacatggaagaaaccaaaagatcggacccgaaccactgaagagatgttagaggcagaattggagcttaaagctgaagaggagctttccattgacaaagtacttgaatctgaacaagataaaatgagccaggggtttcatcctgaaagagacccctctgacctaaaaaaagtgaaagctgtggaagaaaatggagaagaagctgagccagtacgtaatggtgctgagagtgtttctgagggtgaaggaatagatgctaattcaggctccacagatagttctggtgatggggttacatttccatttaaaccagaatcctggaagcctactgatactgaaggtaagaagcagtatgacagggagtttctgctggacttccagttcatgcctgcctgtatacaaaaaccagagggcctgcctcctatcagtgatgtggttcttgacaagatcaaccaacccaaattgccaatgcgaactctggatcctcgaattttgcctcgaggaccagactttacaccagcctttgctgattttggaaggcagacacctggtggaagaggcgtacctttgttgaatgttgggtcacgaagatctcaacctggccaaagaagagaacccagaaagatcatcacagtttctgtaaaagaagatgtacacctgaaaaaggcagaaaatgcctggaagccaagccaaaaacgagacagccaagccgatgatcccgaaaacattaaaacccaggagctttttagaaaagttcgaagtatcttaaataaattgacaccacagatgttcaatcaactgatgaagcaagtgtcaggacttactgttgacacagaggagcggctgaaaggagttattgacctggtctttgagaaggctattgatgaacccagtttctctgtggcttacgcaaacatgtgtcgatgtctagtaacgctgaaagtacccatggcagacaagcctggtaacacagtgaatttccggaagctgctactgaaccgttgccagaaggagtttgaaaaagataaagcagatgatgatgtctttgagaagaagcagaaagaacttgaggctgccagtgctccagaggagaggacaaggcttcatgatgaactggaagaagccaaggacaaagcccggcggagatccattggcaacatcaagtttattggagaactctttaaactcaaaatgctgactgaagccatcatgcatgactgtgtggtgaagctgctaaagaaccatgatgaagaatccctggagtgcctgtgtcgcctgctcaccaccattggcaaagacttggactttgaaaaagcaaagccacgtatggaccagtactttaatcagatggagaaaattgtgaaagaaagaaaaacctcatctaggattcggttcatgcttcaagatgttatagacctaaggctgtgcaattgggtatctcgaagagcagatcaagggcctaaaactatcgaacagattcacaaagaggctaaaatagaagaacaagaagagcaaaggaaggtccagcaactcatgaccaaagagaagagaagaccaggtgtccagagagtggacgaaggtgggtggaacactgtacaaggggccaagaacagtcgggtactggacccctcaaaattcctaaaaatcactaagcctacaattgatgaaaaaattcagctggtacctaaagcacagctaggcagctggggaaaaggcagcagtggtggagcaaaggcaagtgagactgatgccttacggtcaagtgcttccagtttaaacagattctctgccctgcaacctccagcaccctcagggtccacgccatccacgcctgtagagtttgattcccgaaggaccttaactagtcgtggaagtatgggcagggagaagaatgacaagccccttccatctgcaacagctcggccaaatactttcatgaggggtggcagcagtaaagacctgctagacaatcagtctcaagaagagcagcggagagagatgctggagaccgtgaagcagctcacaggaggtgtggatgtggagaggaacagcactgaggctgagcgaaataaaacaagggagtcagcaaaaccagaaatttcagcaatgtcagctcatgacaaggctgcattatcagaagaggaactggagaggaagtcgaaatctatcattgatgaatttctacacattaatgattttaaggaagccatgcagtgtgtggaagagctgaatgcccagggcctactacatgtttttgtgagagtgggagtggagtccaccctggaaaggagccagatcaccagggatcacatgggccaactactctatcagctggtacagtcagaaaaactcagcaaacaggactttttcaaaggtttttcagaaactttggaattggcagatgacatggccattgatattccccatatttggttgtaccttgctgaactggtgacccccatgttaaaagaaggtggaatctccatgagagaacttaccatagaatttagcaaacctttacttcctgttggaagagctggggtcttgctatctgaaatattgcacctactatgcaaacaaatgagccataagaaagtgggagccttatggagggaggctgacctcagctggaaggactttttaccagaaggagaagatgtacataattttcttttggagcagaagttggacttcatagagtctgacagtccctgttcctctgaagcactttcaaagaaagaactgtctgccgaagagctgtataagcgactcgagaaactcattattgaggacaaagcgaatgatgaacagatctttgactgggtagaggctaatctagacgaaatccagatgagttcacctacattccttagagctttaatgactgctgtttgtaaagcagctattatagccgactcttctaccttcagagtggacactgctgttatcaagcagagagtgccgatcttactcaagtacctagactcagatacagagaaggaactgcaagcactttatgcactacaagcatcgatagtaaaacttgatcaacctgccaatttgctgcggatgttttttgattgtctatatgacgaggaggtgatctccgaggatgccttctacaaatgggagagcagcaaggaccctgcagagcagaatgggaagggcgtggctctgaaatctgtcacggcattcttcacgtggctgcgggaagcagaagaggagtctgaggataactaaaacttcaaatacacaaaatgaaacaaaagaaacaatttaagtatttttttaaaaagtttcacgtcttcgccaatcacagtgcagcaaggccaattctcgcagaaaccccacgtgtgcacgagtgggagaggggaaagagaaaaaaaggtgtacatggaggaaaaaggtactggataaaagtaaacttcaaaccttagggcgggagcactaaaaccaaaatacatgtattatttatagaaaatattttctgttttaatcttttctttttaaacaaggactcatacttaaaaaaatgtttagcaaaaaaaaaaaaaagttgagaacttttaatttattttaaggactgcaaatgccagtgtaattttttaatttgcagtttctgtaaacaactgtataatagaaaagcagagaaataaatttccctccccttcaagatgcacctcatgtttgttttaaggtatagcatttagtccagatttgagaaagtttggggtgaacaaggtaagaaagatttttttttttttggcatcaaatctttctgcctgcctctcagcttgcttcagaaaatttaaaaaatcacaatagtaatcaaaacatacataacattgaaacagaaggaaatgctgtggaccacagaactccaagaattgtttaaaaaaaaaaaagtgctaccctgagaaaagtactcttaatatctcttgaaatctttagagcaactttaaggcttgtaaatacatagaacaaatatttaaaaaaacaaaaagaaattgactcagtactatttcttttcactttgaaaatataaagaacaaaataaagacaaacattgcaagtttaaaaaaaaaaaaaaaaaaaaaaaaaaaaaa

SEQ ID NO: 141 - DNA, 3494 bp, Homo sapiens
ggcacccttcggcgagcgctgtttgtttagggctcggtgagtccaatcaggagcccaggctgcagttttccggcagagcagtaagaggcgcctcctctctcctttttattcaccagcagcgcggcgcagaccccggactcgcgctcgcccgctggcgccctcggcttctctccgcgcctgggagcaccctccgccgcggccgttctccatgcgcagcgcccgcccgaggagctagacgtcagcttggagcggcgccggaccgtggatggccttgactgacggcggctggtgcttgccgaagcgcttcggggccgcgggtgcggacgccagcgactccagagcctttccagcgcgggagccctccacgccgccttcccccatctcttcctcgtcctcctcctgctcccggggcggagagcggggccccggcggcgccagcaactgcgggacgcctcagctcgacacggaggcggcggccggacccccggcccgctcgctgctgctcagttcctacgcttcgcatcccttcggggctccccacggaccttcggcgcctggggtcgcgggccccgggggcaacctgtcgagctgggaggacttgctgctgttcactgacctcgaccaagccgcgaccgccagcaagctgctgtggtccagccgcggcgccaagctgagccccttcgcacccgagcagccggaggagatgtaccagaccctcgccgctctctccagccagggtccggccgcctacgacggcgcgcccggcggcttcgtgcactctgcggccgcggcggcagcagccgcggcggcggccagctccccggtctacgtgcccaccacccgcgtgggttccatgctgcccggcctaccgtaccacctgcaggggtcgggcagtgggccagccaaccacgcgggcggcgcgggcgcgcaccccggctggcctcaggcctcggccgacagccctccatacggcagcggaggcggcgcggctggcggcggggccgcggggcctggcggcgctggctcagccgcggcgcacgtctcggcgcgcttcccctactctcccagcccgcccatggccaacggcgccgcgcgggagccgggaggctacgcggcggcgggcagtgggggcgcgggaggcgtgagcggcggcggcagtagcctggcggccatgggcggccgcgagccccagtacagctcgctgtcggccgcgcggccgctgaacgggacgtaccaccaccaccaccaccaccaccaccaccatccgagcccctactcgccctacgtgggggcgccactgacgcctgcctggcccgccggacccttcgagaccccggtgctgcacagcctgcagagccgcgccggagccccgctcccggtgccccggggtcccagtgcagacctgctggaggacctgtccgagagccgcgagtgcgtgaactgcggctccatccagacgccgctgtggcggcgggacggcaccggccactacctgtgcaacgcctgcgggctctacagcaagatgaacggcctcagccggcccctcatcaagccgcagaagcgcgtgccttcatcacggcggcttggattgtcctgtgccaactgtcacaccacaactaccaccttatggcgcagaaacgccgagggtgaacccgtgtgcaatgcttgtggactctacatgaaactccatggggtgcccagaccacttgctatgaaaaaagagggaattcaaaccaggaaacgaaaacctaagaacataaataaatcaaagacttgctctggtaatagcaataattccattcccatgactccaacttccacctcttctaactcagatgattgcagcaaaaatacttcccccacaacacaacctacagcctcaggggcgggtgccccggtgatgactggtgcgggagagagcaccaatcccgagaacagcgagctcaagtattcgggtcaagatgggctctacataggcgtcagtctcgcctcgccggccgaagtcacgtcctccgtgcgaccggattcctggtgcgccctggccctggcctgagcccacgccgccaggaggcagggagggctccgccgcgggcctcactccactcgtgtctgcttttgtgcagcggtccagacagtggcgactgcgctgacagaacgtgattctcgtgcctttattttgaaagagatgtttttcccaagaggcttgctgaaagagtgagagaagatggaagggaagggccagtgcaactgggcgcttgggccactccagccagcccgcctccggggcggaccctgctccacttccagaagccaggactaggacctgggccttgcctgctatggaatattgagagagattttttaaaaaagattttgcattttgtccaaaatcatgtgcttcttctgatcaattttggttgttccagaatttcttcataccttttccacatccagatttcatgtgcgttcatggagaagatcacttgaggccatttggtacacatctctggaggctgagtcggttcatgaggtctcttatcaaaaatattactcagtttgcaagactgcattgtaactttaacatacactgtgactgacgtttctcaaagttcatattgtgtggctgatctgaagtcagtcggaatttgtaaacagggtagcaaacaagatatttttcttccatgtatacaataatttttttaaaaagtgcaatttgcgttgcagcaatcagtgttaaatcatttgcataagatttaacagcattttttataatgaatgtaaacattttaacttaatggtacttaaaataatttaaaagaaaaatgttaacttagacattcttatgcttcttttacaactacatcccattttatatttccaattgttaaagaaaaatatttcaagaacaaatcttctctcaggaaaattgcctttctctatttgttaagaatttttatacaagaacaccaatataccccctttattttactgtggaatatgtgctggaaaaattgcaacaacactttactacctaacggatagcatttgtaaatactctaggtatctgtaaacactctgatgaagtctgtatagtgtgactaacccacaggcaggttggtttacattaatttttttttttgaatgggatgtcctatggaaacctatttcaccagagttttaaaaataaaaagggtattgttttgtcttctgtacagtgagttccttcccttttcaaagctttctttttatgctgtatgtgactatagatattcatataaaacaagtgcacgtgaagtttgcaaaatgctttaaggccttcctttcaaagcatagtccttttggagccgttttgtaccttttataccttggcttatttgaagttgacacatggggttagttactactctccatgtgcattggggacagtttttataagtgggaaggactcagtattattatatttgagatgataagcattttgtttgggaacaatg

SEQ ID NO: 142 - DNA, 2308 bp, Homo sapiens
acttccgcgggcacccaactgtgcgtctcctgcgcgctgacgtcaggtgcgtgcccctgtccggcagccgaggagaccccgcgcagtgctgccaacgccccggtggagaagctgagacggagtctcactgtgttgcccaggctggagtgcagtggcgccatcttggctcactgcagtgcgcctctgccccccgagttcaagcgattctcctgcctcaggctcctgagtagctgggactacaggtcatcatcagatttgaaatatttaaagtggatacaaaactatttcagcaatgcagacaattaagtgtgttgttgtgggcgatggtgctgttggtaaaacatgtctcctgatatcctacacaacaaacaaatttccatcggaatatgtaccgactgtttttgacaactatgcagtcacagttatgattggtggagaaccatatactcttggactttttgatactgcagggcaagaggattatgacagattacgaccgctgagttatccacaaacagatgtatttctagtctgtttttcagtggtctctccatcttcatttgaaaacgtgaaagaaaagtgggtgcctgagataactcaccactgtccaaagactcctttcttgcttgttgggactcaaattgatctcagagatgacccctctactattgagaaacttgccaagaacaaacagaagcctatcactccagagactgctgaaaagctggcccgtgacctgaaggctgtcaagtatgtggagtgttctgcacttacacagaaaggcctaaagaatgtatttgacgaagcaatattggctgccctggagcctccagaaccgaagaagagccgcaggtgtgtgctgctatgaacatctctccagagccctttctgcacagctggtgtcggcatcatactaaaagcaatgtttaaatcaaactaaagattaaaaattaaaattcgtttttgcaataatgacaaatgccctgcacctacccacatgcactcgtgtgagacaaggcccataggtatggccccccccttccccctcccagtactagttaattttgagtaattgtattgtcagaaaagtgattagtactatttttttttgttgtttcaaaaaaaaaatttttgtgtgtgtgtgttttttttttttttttttttgttgtttaaaagcaaggcatgcttgtggatgactctgtaacagactaattggaattgttgaagctgctccctggttccactctggagagtaatctgggacatcttagtgttttgttttgtttttttccctcctcttttttttgggggggagtgtgtgtggggtttgttttttagtcttgtttttttaattcattaaccagtggttagcccttaaggggaggaggacggattgattccacattccacttcctagatctagtttagaaaacatgttccccatctggtgctcttaggaaggagtatagtaaatgcctcatttaataacatactcctttttgaaagttgccttttctctccacccttgagtagatccagtatttgatgaaactcatgaaagtgggtggagcccatcttgcccctcctcttttctaggacgcactatatgtgactgtgactttcaaggacatttgtttgccatttgctgatttttttgggaagttaatttctaacttctttcactgataaatgaagaaaagtattgcacctttgaaatgcaccaaatgaattgagtttgtaattaaaaaaatttttttccctttcagtcattgtcttatatgcttagcatagatttgcagctcagtagtatatggtgttcctagaatgcagctgaagacctgttatgtagaggaaatacgaggggtggtgctagaagacagacatctgtggaatgattcacatcctctcaagttaggaggatggaggcctgcttcattaagaagctgggggtagggtgggggtggggagaacacttaacaacatggggaccagtcaggggaatccccttatttctgttttgcatatgaggaaccctagagcagccaggtgaggctctctagtttaataaaaatcatggaaagactcttaatgcagactcttcttaagtgttaatagggattttttcagcttattttggttgcagtttccaatttttaaaaatgttgaggtaatctttcccaccttcccaaacctaattcttgtagatgcattagtgttgaaccaatgctttctcatgtctcaattctttgtatatgcattcttttcagatgtattaaacaaacaaaaacccttcaaaaaaaaaaaaaaa

SEQ ID NO: 143 - DNA, 6028 bp, Homo sapiens
ggtgtggacgttgtctaaatttcggtagccatggcacaagaatataagaaagcatgggattatggcaaccacagaatctcagtagtacaagttccattcagttttttctgaaagaaagccctctgttaaagtgaagcaaagaaactgttgtggattataacgtttagaagttccaatttttcagtgctttacaaataaagcatcatttaaccttttaaatgaaaaagattaagatctcatgcaactgttgtattttctggaagccattctccaaaagggaagtgcacatttaaaacacagatatgatggtccttgctgcagggatttaagtctacttgcttttacatcatgaccagcttgaaacggtcacagacagaaaggcctcttgccactgacagggcctctgttgttggcacagacggcacccccaaagtccacactgatgatttctacatgcggcgcttccggtcccaaaatggcagcttaggatcatcagttatggctcctgtaggacccccccgaagtgaaggttctcaccatataacctcaacccccggagtcccaaaaatgggggtaagggcaaggattgcagattggcccccaagaaaggaaaacataaaagaatctagccgttcaagccaggaaatagaaacctcaagttgccttgatagcctgtcctccaaaagcagtcctgtgagtcagggaagttctgttagcctcaattccaatgactcagccatgctgaaaagcatacagaacacgctgaaaaacaagacaagaccgtcggagaacatggactccagatttctcatgcctgaagcctaccccagctcccccagaaaagctcttcgcagaatacgccagcgaagcaacagtgatatcaccataagtgaacttgatgtggatagctttgatgaatgtatctcacctacatacaagactggaccatcactgcacagggaatatggtagcacatcttcaattgataaacagggaacatctggagaaagcttttttgatttgttaaagggctacaaagatgacaaatctgatcgaggtccaactccaaccaagctcagtgactttctcattactggtggtggcaagggttctggtttctctttggatgtaatagacgggcctatctcacagagagagaacctcaggctttttaaggaaagggaaaaaccactcaagcgacgttcaaaatctgaaactggagactcctctatttttcgtaaattgcgcaatgccaaaggtgaagaacttgggaagtcatcagatcttgaagataaccgatcagaagactctgtcaggccctggacatgtccaaagtgctttgcccactatgatgtccagagtatattatttgatttgaatgaggcaattatgaacaggcacaatgttattaagaggagaaacaccaccactggagcttccgcagctgccgtggcatccttggtctctggacctctgtctcattcagccagttttagctccccaatgggcagcacagaggacctgaattccaaaggaagcctcagcatggaccagggagatgataaaagcaatgagcttgtaatgagctgtccatattttcggaatgagataggtggagaaggggagaggaaaatcagcctttcaaaatcaaattctggctcctttagtggatgtgaaagtgcctcctttgagtctacccttagttcccattgcacaaatgcaggagtggcagtacttgaagtgcccaaggagaacttggtgttgcacctagatagagtgaaaagatacatcgtggaacacgtagatctgggtgcatactattatagaaaatttttctaccagaaggaacactggaactattttggggctgatgagaatcttggtccagtggctgtgagcattcgaagggaaaaaccagatgaaatgaaagaaaatggatctccgtacaactaccgaataatttttagaactagtgagctcatgacactgagaggttcggtcctggaggacgccattccgtcgacagccaagcactcgacagccagaggcctgcctctcaaagaagtgctggagcacgtggttcctgagctcaatgtccagtgcctgcggttggccttcaacacacccaaggtcacagagcagctcatgaaactggatgaacaagggctgaactaccagcagaaagtaggcatcatgtactgcaaagctggacagagcactgaagaagagatgtacaacaatgagtcagctggcccagcctttgaagaattccttcaactattgggagagcgagttcggctcaaaggatttgagaagtatcgagcacagcttgataccaaaactgactccactggaacccattctctgtacacaacatacaaagattatgaaattatgttccatgtttctaccatgctgccatacacacccaacaacaaacaacagctcctgaggaagcggcacattggaaatgatatcgtaacaattgttttccaagagcctggagcacagccattcagcccaaaaaacatccgatcccacttccagcacgttttcgtcatcgtcagggtgcacaatccgtgctctgacagtgtctgttatagtgtggctgttaccaggtccagagatgtgccttcctttgggcctcccattcctaaaggggtcactttccctaagtcaaatgtgttcagggacttccttttggcgaaagtgattaatgcagaaaatgctgctcataaatcggagaagtttcgggccatggcaactcggacccgccaggaatacctgaaagatctggcagaaaagaatgtcaccaacacccctatcgacccttctggcaagtttccgttcatctctctggcttccaagaagaaggaaaagtctaagccatatccaggagccgagctcagcagcatgggggccattgtatgggcagtccgggctgaagactacaacaaggccatggaactagactgccttttagggatctccaatgagttcattgtgctcattgaacaggaaacaaagagcgtggtcttcaattgttcctgtagagatgtgatagggtggacttcaactgacaccagcctcaaaatcttctatgaacgaggagaatgtgtttcagtgggtagttttattaacattgaggagatcaaagagattgtcaaaaggttgcagtttgtttcaaaaggctgtgaatcggtggagatgactctgcgaagaaatgggctaggacagcttggcttccatgtcaactatgagggcattgtggcggatgtggagccctacggttatgcctggcaggcagggctgaggcagggcagtcgcctggtggagatctgcaaggtggcggtagccactctgagccatgagcagatgatcgacctcctgagaacatctgtcacggtgaaggttgtcatcattcccccgcatgatgactgcaccccgcggaggagttgctctgaaacctaccgcatgccagtgatggagtacaaaatgaatgaaggtgtttcatacgaattcaagtttcccttccgaaataataacaagtggcagaggaacgccagcaaggggcctcattcacctcaagtcccgtcccaggtgcagagtcccatgacctcgcggctgaatgctggaaaaggagatgggaagatgcctcctccagaaagagccgccaacatccctcgaagcatctccagtgacgggcgcccactagagaggcggctgtctcctggttcggacatctatgtgacggtctcatccatggctttagcaagatcccagtgtcggaactctcctagcaacttgtcttcatccagtgatactggttctgtggggggcacttacaggcagaagtccatgcccgaagggtttggagtgagccgtagatccccagcctccattgacaggcagaacacccagtcagatattggtggcagcggaaaatccacgcctagctggcaaagaagtgaggatagcattgctgaccagatggcttacagttatagaggacctcaggatttcaattcttttgtcctcgagcagcatgaatatacagagccaacatgccatctcccagcagtatcaaaggtactgccagctttccgagagagccccagtgggagattaatgcggcaggatccagtggttcatttgtctccaaacaaacaagggcattctgatagccactactcgagccactccagtagcaatactctctccagcaatgcgtcaagtgcccatagtgatgagaagtggtacgatggggaccgcacagaatccgaactcaacagctataactatctgcaaggcacctctgctgacagtggcattgacaccacctcttatggccccagccacggcagcacagcctcgctgggggctgccacatcgtcacctcgctcagggccaggcaaggagaaagtggcacccctatggcacagctccagtgaagtaatctccatggcagatcggactttggagacagagagccacggcctggaccggaaaacagagtcttccctgagcttagacatacacagcaagagccaagccggctcgacccctctgacaagggagaacagcaccttcagtataaacgatgctgcttcccacacaagtaccatgagctcccgacactctgccagcccagtggttttcaccagtgcccggagttcacctaaagaagagcttcatccagctgccccctcacagctcgcaccatccttctcctcctcttcctcctcctcctctggtcctaggagtttttaccctcgccagggcgctactagcaagtacctgattggatggaaaaaacccgaaggaaccataaactccgtgggatttatggacacgagaaagcgtcatcagagcgatggcaatgaaatagcccacaccaggctgcgtgcctcaaccagagacctccgggcatctcctaagccaacctccaagtccaccattgaagaagatctaaagaaactaattgatcttgaaagcccaactcctgaatcacagaagagttttaagttccacgcactctcctctcctcagtctcctttccccagcacccccacctcacggcgggccttgcacagaacactgtcggacgagagcatttacaatagccagagggagcactttttcacctccagggcgtcacttctggaccaagccctgcccaacgacgtcctcttcagtagcacgtacccttctctccccaagtcgctcccgttgaggaggccttcttacaccttaggaatgaaatcgctgcatggagagttctcagcctcggacagctccctcactgacatccaggagacccgcaggcagcctatgcccgaccctggcctgatgcccctgcctgacactgctgcagacttggattggtccaacctggtagatgctgccaaagcctatgaggtccagagagcctcattttttgctgctagtgatgaaaaccatcgccccttgagtgctgcatccaacagtgatcagctggaggaccaggctctggcccagatgaagccttacagcagcagtaaagactcctctcccactctggcttctaaagtggaccagctggaaggtatgctgaagatgcttcgggaagatttgaagaaggaaaaagaagacaaagctcaccttcaggcggaggtgcagcacctgcgagaggacaacctgaggctacaggaggagtcccagaacgcctcggacaagctgaagaagttcacagaatgggtcttcaacaccatagacatgagctagggaaggctgaggaggacaggagaagggcccagacactccctccagtgagtgtcctgcagcccttattccctccatagaaagcatcctcagagcaccttccctggcttcctactctgccccctttcggggagtgcacaacacaatagttgcagatcaacaatcatcacctgccttttgtagaaaagaaaaacaaaaaaagtaaataaaaattttaaacagtaaaataaaagtttaactgctaaaaaaaaaaaaaaaaaaaaaaaaa

SEQ ID NO: 144 - DNA, 2664 bp, Homo sapiens
atgacccaggggaagaagaagaaacgggccgcgaaccgcagtatcatgctggccaagaagatcatcattaaggacggaggcacgcctcaaggaataggttctcctagtgtctatcatgcagttatcgtcatctttttggagttttttgcttggggactattgacagcacccaccttggtggtattacatgaaacctttcctaaacatacatttctgatgaacggcttaattcaaggagtaaagggtttgttgtcattccttagtgccccgcttattggtgctctttctgatgtttggggccgaaaatccttcttgctgctaacggtgtttttcacatgtgccccaattcctttaatgaagatcagcccatggtggtactttgctgttatctctgtttctggggtttttgcagtgactttttctgtggtatttgcatacgtagcagatataacccaagagcatgaaagaagtatggcttatggactggtttcagcaacatttgctgcaagtttagtcaccagtcctgcaattggagcttatcttggacgagtatatggggacagcttggtggtggtcttagctacagcaatagctttgctagatatttgttttatccttgttgctgtgccagagtcgttgcctgagaaaatgcggccagcatcctggggagcacccatttcctgggaacaagctgacccttttgcgtccttaaaaaaagtcggccaagattccatagtgctgctgatctgcattacagtgtttctctcctacctaccggaggcaggccaatattccagcttttttttatacctcagacagataatgaaattttcaccagaaagtgttgcagcgtttatagcagtccttggcattctttccattattgcacagaccatagtcttgagtttacttatgaggtcaattggaaataagaacaccattttactgggtctaggatttcaaatattacagttggcatggtatggctttggttcagaaccttggatgatgtgggctgctggggcagtagcagccatgtctagcatcacctttcctgctgtcagtgcacttgtttcacgaactgctgatgctgatcaacagggtgtcgttcaaggaatgataacaggaattcgaggattatgcaatggtctgggaccggccctctatggattcattttctacatattccatgtggaacttaaagaactgccaataacaggaacagacttgggaacaaacacaagccctcagcaccactttgaacagaattccatcatccctggccctcccttcctatttggagcctgttcagtactgctggctctgcttgttgccttgtttattccggaacataccaatttaagcttaaggtccagcagttggagaaagcactgtggcagtcacagccatcctcataatacacaagcgccaggagaggccaaagaacctttactccaggacacaaatgtgtgacgactgaaatcaggaagatttttctatcagcacccaggtcttagttttcacctctagttctggatgtacattccatttccatccacagtgtactttaagattgtcttaagaaatgtatctgcatgaactccgtgggaactaaaggaagtgggaacttagaaccagacagttttccaaagatgttacaatttcttttgaaaaaccttttgtttattagcaccaatttcttgccactaagctatttgttttattatacatcctttaattaaaaactatatatgtaacttcttagatattagcaaatgtctctgctaccatttccttaaggtgttgagctttaactctatgctgactcagtgagacacagtaggtagtatggttgtggacctatttgttttaacattgtaaaattttgagtcagattttaatattgtaaaatcttgggtcaaataattcaaagccttaatgcagatgcactaaaacaaagaaatggtaaatgaattgtttgcatttaaaaaaaaaaactcttaagaaaactgtactaaatctgaatcatgttttgagcttgtttgcagtacttttaaacattattcactactgtttttgaagtgagaaagtatcagccatttagcatttaagttggggtatttagagcctgtaatctaaatgctggctcaaatttattccccagctacttcttataccactattcttttaatgtttgcataatcataagcacctcaacacttgaatacataatctaaaaattatatagtaaagctggtagccttgaaaatgtcagtgtgatatctattatgtagataaatatatatagtggcctttcaggactgtcacagtaacactttatttacagagctaatgtttgtcctaaattttcaggaccctagaggagagctttatacaattaccgatgtgaatttctctaaagtgtatatttttgtgtccagttatattatttaaaaaagtgttactttgtaaaaattgtatataaagaactgtatagtttacactgttttcatcttgtgtgtggttattgcttaatgctttttaaacttggaacactcactatggttaaataaggtcttaaaagaaatgtaaatattctgttaataaagttaaatattttaatgattttttttttaaaaaaaaaaaaaaaaaaaaaaaaaaaaa

SEQ ID NO: 145 - DNA, 916 bp, Homo sapiens
ccagagaggggcaggctggtcccctgacaggttgaagcaagtagacgcccaggagccccgggagggggctgcagtttccttccttccttctcggcagcgctccgcgcccccatcgcccctcctgcgctagcggaggtgatcgccgcggcgatgccggaggagggttcgggctgctcggtgcggcgcaggccctatgggtgcgtcctgcgggctgctttggtcccattggtcgcgggcttggtgatctgcctcgtggtgtgcatccagcgcttcgcacaggctcagcagcagctgccgctcgagtcacttgggtgggacgtagctgagctgcagctgaatcacacaggacctcagcaggaccccaggctatactggcaggggggcccagcactgggccgctccttcctgcatggaccagagctggacaaggggcagctacgtatccatcgtgatggcatctacatggtacacatccaggtgacgctggccatctgctcctccacgacggcctccaggcaccaccccaccaccctggccgtgggaatctgctctcccgcctcccgtagcatcagcctgctgcgtctcagcttccaccaaggttgtaccattgcctcccagcgcctgacgcccctggcccgaggggacacactctgcaccaacctcactgggacacttttgccttcccgaaacactgatgagaccttctttggagtgcagtgggtgcgcccctgaccactgctgctgattagggttttttaaattttattttattttatttaagttcaagagaaaaagtgtacacacaggggccacccggggttggggtgggagtgtggtggggggtagtggtggcaggacaagagaaggcattgagctttttctttcattttcctattaaaaaatacaaaaatcaaaa

SEQ ID NO: 146 - DNA, 971 bp, Homo sapiens
gtccgggtgacgtctcccgagggcgtcggcagggtcggcggcgtcggcagcagtgtcgacggcagcggcggcggcgggtgggaaatggcggagtatctggcctccatcttcggcaccgagaaagacaaagtcaactgttcattttatttcaaaattggagcatgtcgtcatggagacaggtgctctcggttgcacaataaaccgacgtttagccagaccatcttgattcaaaacatctatcgtaatccccaaaacagtgcacagacggctgacggctcacactgtgccgtgagcgatgtggagatgcaggaacactatgatgagttttttgaggaggtttttacagaaatggaggagaagtatggggaagtagaggagatgaacgtctgtgacaacctgggagaccacctggtggggaacgtgtacgtcaagtttcgccgtgaggaagatgcggaaaaggctgtgattgacttgaataaccgttggtttaatggacagccgatccacgccgagctgtcacccgtgacggacttcagagaagcctgctgccgtcagtatgagatgggagaatgcacacgaggcggcttctgcaacttcatgcatttgaagcccatttccagagagctgcggcgggagctgtatggccgccgtcgcaagaagcatagatcaagatcccgatcccgggagcgtcgttctcggtctagagaccgtggtcgtggcggtggcggtggcggtggtggaggtggcggcggacgggagcgtgacaggaggcggtcgagagatcgtgaaagatctgggcgattctgagccatgccatttttaccttatgtctgctagaaagtgttgtagttgattgaccaaaccagttcataaggggaattttttttaaaaaacaacaaaaaaaaaaacatacaaagatgggtttctgaataaaatttgtagtgataacagtaaaaaaaaaaaaaaaaaaa

SEQ ID NO: 147 - DNA, 6157 bp, Homo sapiens
ggcggccgcagcctcggctacagcttcggcggcgaaggtcagcgccgacggcagccggcacctgacggcgtgaccgacccgagccgatttctcttggatttggctacacacttatagatcttctgcactgtttacaggcacagttgctgatatgtgttcaagatgagtgggatgggagaaaatacctctgacccctccagggcagagacaagaaagcgcaaggaatgtcctgaccaacttggacccagccccaaaaggaacactgaaaaacgtaatcgtgaacaggaaaataaatatatagaagaacttgcagagttgatttttgcaaattttaatgatatagacaactttaacttcaaacctgacaaatgtgcaatcttaaaagaaactgtgaagcaaattcgtcagatcaaagaacaagagaaagcagcagctgccaacatagatgaagtgcagaagtcagatgtatcctctacagggcagggtgtcatcgacaaggatgcgctggggcctatgatgcttgaggcccttgatgggttcttctttgtagtgaacctggaaggcaacgttgtgtttgtgtcagagaatgtgacacagtatctaaggtataaccaagaagagctgatgaacaaaagtgtatatagcatcttgcatgttggggaccacacggaatttgtcaaaaacctgctgccaaagtctatagtaaatgggggatcttggtctggcgaacctccgaggcggaacagccataccttcaattgtcggatgctggtaaaacctttacctgattcagaagaggagggtcatgataaccaggaagctcatcagaaatatgaaactatgcagtgcttcgctgtctctcaaccaaagtccatcaaagaagaaggagaagatttgcagtcctgcttgatttgcgtggcaagaagagttcccatgaaggaaagaccagttcttccctcatcagaaagttttactactcgccaggatctccaaggcaagatcacgtctctggataccagcaccatgagagcagccatgaaaccaggctgggaggacctggtaagaaggtgtattcagaagttccatgcgcagcatgaaggagaatctgtgtcctatgctaagaggcatcatcatgaagtactgagacaaggattggcattcagtcaaatctatcgtttttccttgtctgatggcactcttgttgctgcacaaacgaagagcaaactcatccgttctcagactactaatgaacctcaacttgtaatatctttacatatgcttcacagagagcagaatgtgtgtgtgatgaatccggatctgactggacaaacgatggggaagccactgaatccaattagctctaacagccctgcccatcaggccctgtgcagtgggaacccaggtcaggacatgaccctcagtagcaatataaattttcccataaatggcccaaaggaacaaatgggcatgcccatgggcaggtttggtggttctgggggaatgaaccatgtgtcaggcatgcaagcaaccactcctcagggtagtaactatgcactcaaaatgaacagcccctcacaaagcagccctggcatgaatccaggacagcccacctccatgctttcaccaaggcatcgcatgagccctggagtggctggcagccctcgaatcccacccagtcagttttcccctgcaggaagcttgcattcccctgtgggagtttgcagcagcacaggaaatagccatagttataccaacagctccctcaatgcacttcaggccctcagcgaggggcacggggtctcattagggtcatcgttggcttcaccagacctaaaaatgggcaatttgcaaaactccccagttaatatgaatcctcccccactcagcaagatgggaagcttggactcaaaagactgttttggactatatggggagccctctgaaggtacaactggacaagcagagagcagctgccatcctggagagcaaaaggaaacaaatgaccccaacctgcccccggccgtgagcagtgagagagctgacgggcagagcagactgcatgacagcaaagggcagaccaaactcctgcagctgctgaccaccaaatctgatcagatggagccctcgcccttagccagctctttgtcggatacaaacaaagactccacaggtagcttgcctggttctgggtctacacatggaacctcgctcaaggagaagcataaaattttgcacagactcttgcaggacagcagttcccctgtggacttggccaagttaacagcagaagccacaggcaaagacctgagccaggagtccagcagcacagctcctggatcagaagtgactattaaacaagagccggtgagccccaagaagaaagagaatgcactacttcgctatttgctagataaagatgatactaaagatattggtttaccagaaataacccccaaacttgagagactggacagtaagacagatcctgccagtaacacaaaattaatagcaatgaaaactgagaaggaggagatgagctttgagcctggtgaccagcctggcagtgagctggacaacttggaggagattttggatgatttgcagaatagtcaattaccacagcttttcccagacacgaggccaggcgcccctgctggatcagttgacaagcaagccatcatcaatgacctcatgcaactcacagctgaaaacagccctgtcacacctgttggagcccagaaaacagcactgcgaatttcacagagcacttttaataacccacgaccagggcaactgggcaggttattgccaaaccagaatttaccacttgacatcacattgcaaagcccaactggtgctggacctttcccaccaatcagaaacagtagtccctactcagtgatacctcagccaggaatgatgggtaatcaagggatgataggaaaccaaggaaatttagggaacagtagcacaggaatgattggtaacagtgcttctcggcctactatgccatctggagaatgggcaccgcagagttcggctgtgagagtcacctgtgctgctaccaccagtgccatgaaccggccagtccaaggaggtatgattcggaacccagcagccagcatccccatgaggcccagcagccagcctggccaaagacagacgcttcagtctcaggtcatgaatatagggccatctgaattagagatgaacatggggggacctcagtatagccaacaacaagctcctccaaatcagactgccccatggcctgaaagcatcctgcctatagaccaggcgtcttttgccagccaaaacaggcagccatttggcagttctccagatgacttgctatgtccacatcctgcagctgagtctccgagtgatgagggagctctcctggaccagctgtatctggccttgcggaattttgatggcctggaggagattgatagagccttaggaatacccgaactggtcagccagagccaagcagtagatccagaacagttctcaagtcaggattccaacatcatgctggagcagaaggcgcccgttttcccacagcagtatgcatctcaggcacaaatggcccagggtagctattctcccatgcaagatccaaactttcacaccatgggacagcggcctagttatgccacactccgtatgcagcccagaccgggcctcaggcccacgggcctagtgcagaaccagccaaatcaactaagacttcaacttcagcatcgcctccaagcacagcagaatcgccagccacttatgaatcaaatcagcaatgtttccaatgtgaacttgactctgaggcctggagtaccaacacaggcacctattaatgcacagatgctggcccagagacagagggaaatcctgaaccagcatcttcgacagagacaaatgcatcagcaacagcaagttcagcaacgaactttgatgatgagaggacaagggttgaatatgacaccaagcatggtggctcctagtggtatgccagcaactatgagcaaccctcggattccccaggcaaatgcacagcagtttccatttcctccaaactacggaataagtcagcaacctgatccaggctttactggggctacgactccccagagcccacttatgtcaccccgaatggcacatacacagagtcccatgatgcaacagtctcaggccaacccagcctatcaggccccctccgacataaatggatgggcgcaggggaacatgggcggaaacagcatgttttcccagcagtccccaccacactttgggcagcaagcaaacaccagcatgtacagtaacaacatgaacatcaatgtgtccatggcgaccaacacaggtggcatgagcagcatgaaccagatgacaggacagatcagcatgacctcagtgacctccgtgcctacgtcagggctgtcctccatgggtcccgagcaggttaatgatcctgctctgaggggaggcaacctgttcccaaaccagctgcctggaatggatatgattaagcaggagggagacacaacacggaaatattgctgacactgctgaagccagttgcttcttcagctgaccgggctcacttgctcaaaacacttccagtctggagagctgtgtctatttgtttcaacccaactgacctgccagccggttctgctagagcagacaggcctggccctggttcccagggtggcgtccactcggctgtggcaggaggagctgcctcttctcttgacagtctgaagctcgcatccagacagtcgctcagtctgttcactgcattcaccttagtgcaacttagatctctcctgcaaaagtaaatgttgacaggcaaatttcatacccatgtcagattgaatgtatttaaatgtatgtatttaaggagaaccatgctcttgttctgttcctgttcggttccagacactggtttcttgctttgttttccctggctaacagtctagtgcaaaagattaagattttatctgggggaaagaaaagaattttttaaaaaattaaactaaagatgttttaagctaaagcctgaatttgggatggaagcaggacagacaccgtggacagcgctgtatttacagacacacccagtgcgtgaagaccaacaaagtcacagtcgtatctctagaaagctctaaagaccatgttggaaagagtctccagttactgaacagatgaaaaggagcctgtgagagggctgttaacattagcaaatattttttccttgttttttctttgttaaaaccaaactggttcacctgaatcatgaattgagaagaaataattttcatttctaaattaagtcccttttagtttgatcagacagcttgaatcagcatctcttcttccctgtcagcctgactcttcccttcccctctctcattccccatactccctattttcattccttttttaaaaaataatataagctacagaaaccaggtaagccctttatttccttaaatgttttgccagccacttaccaattgctaagtattgaatttcagaaaaaaaaaatgcatttactggcaaggagaagagcaaagttaaggcttgataccaatcgagctaaggatacctgctttggaagcatgtttattctgttccccagcaactctggcctccaaaatgggagaaaacgccagtgtgtttaaattgatagcagatatcacgacagatttaacctctgccatgtgttttttattttgttttttagcagtgctgactaagccgaagttttgtaaggtacataaaatccaatttatatgtaaacaagcaataatttaagttgagaacttatgtgttttaattgtataatttttgtgaggtatacatattgtggaattgactcaaaaatgaggtacttcagtattaaattagatatcttcatagcaatgtctcctaaaggtgttttgtaaaggatatcaatgccttgattagacctaatttgtagacttaagactttttattttctaaaccttgtgattctgcttataagtcatttatctaatctatatgatatgcagccgctgtaggaaccaattcttgatttttatatgtttatattctttcttaatgaaccttagaaagactacatgttactaagcaggccacttttatggttgttttt

SEQ ID NO: 148 - DNA, 4727 bp, Homo sapiens
agctgcagcagccgcgccgccccctcgcccgcggctcccagggtgatcccgagcacagccggtggctcgcggcgcggcagccccagaagacgggaaagttcgcggccggagcgcggagatgccgggcagcgacacggcgctcaccgtggaccggacctactcggaccccggccggcaccaccgctgcaagagccgggtagaacgtcatgacatgaataccttaagcctgcccctgaacatacgccgaggggggtcagacaccaacctcaactttgatgtcccggatggcatcctggacttccacaaggtcaaactcactgcagacagcctgaagcaaaaaattctaaaggtaacagagcagataaaaattgagcaaacatcgcgcgatgggaatgttgcggagtatctgaaactagtgaacaacgcagacaagcagcaggcgggacgtatcaagcaagtctttgagaagaagaatcagaaatcagctcactccatcgcccagctgcagaagaagttagagcagtatcatcgaaagctcagagagatcgagcagaatggagcctctaggagctcaaaggacatttccaaagaccacctgaaggatatacatcgctctttgaaagatgcccacgtgaaatctcgaactgccccccattgcatggagagcagcaaatcgggcatgccaggggtctcacttactccacctgtgttcgttttcaataagtccagagagtttgccaacctgatccggaataagtttggcagcgccgacaacattgctcacttgaaaaattccttagaggagtttaggcaagaggcgagtgccagggcctacgggggcagcgctaccatcgtgaacaaacccaagtatggcagtgatgatgaatgttcgagtggcacgtcaggctcggccgacagtaacggaaaccagtcgtttggggctggtggagccagcacactggacagccagggcaagctcgccgtgatcctggaggaactgagggagatcaaggatacccaagctcagctggctgaggacatcgaggcactgaaggtgcagtttaagagagaatatggttttatttctcagaccctgcaagaggaaagatacaggtatgagcgactggaggaccagctgcatgacctgacggacctgcatcagcatgagacagccaacctgaagcaggagctggccagcattgaggagaaggtggcctaccaggcctacgagcgctcgcgggacatccaggaagccttggaatcctgccagactcgcatttctaagctggagctccaccagcaagagcagcaagctctgcagacagacaccgtgaatgctaaagttctcctggggaggtgcatcaacgtgatcctggccttcatgactgtcatcttagtgtgtgtgtccaccatcgcgaagttcgtctcacccatgatgaagagtcgctgccacattcttggcaccttctttgccgtgactcttcttgctatattttgtaaaaactgggaccatatcctgtgtgccatagaaaggatgataataccaagatgaagccactggttcctgccttcaagttctttcaagtttttattttaaagaaaactctgtgcatactaccaaattttacagtgaatgattgtgcggactcgtgtgtaagaaaaactaggactgtgtggggtaaataactacaattctcttaactcggtagcagttgccaactcagtccttgtacttcgttaacacgaatctgtttcagagctctcctaccttgctcactgccttaatcagaccgatttcctgcccacctgaccagcccagcgtggtaaacctctgtatattgagaccttggcataattggtgatcctgaagaaagaggtctctctcctaagtctctgtcagaattgagcttcacaattgctaatggttgttttctgtgagtcctataaaaagcaaggatatgcatgattcagggaatgaagaatcacaggcttgggcagtgttaaacactgtggcctatggtccccgtgtgatccaccctgcttctctccaggggaccataggtcccgtcatgtactcagtgtccacagcagtcagtcgtgtatgaccctgtaacgtggaaatcttatcacacacctgttatccaacaagtctacctgaggggttttgttacactttaaatgggaaggcatagggatttatgaatggggctttcaccttctcatacccaggcaaccaacacctgattttgtctcaactggctagcaaatgcccagccttcagagtgtgcaggaatgttttcaaatccctcatcagactgtgactttaacattaatttggaatcctgtgagcactactctgaaggtttgtgttttggcaaatctttttttcttttttgagacagggctctgctaaatattgctcaggctggttgcaaactccttgcttcaagggatcctcccacctcagcctcccaagcagccgggactgcaggcacaagccaccatgcctggctgttttttggcaaatcttgattgtgataagcccccctggaggatatgattcactttatgtgattcatcttattcacaggtctgtgagggactgcgaagcttactcaggaaatgaaaacaaatgatggtcatgttgcagttttttccttgaaggacaaccgaaccatagcctctaaagttcaagtgcactgaggtgtcggaacgctgaaagcatgaggaaacgaggacgtagggtgtgactgaatggtggctagattagtgggagcagttcacctggatgaagattgagagcatcgtctttgagaagtgaaagactagcaagaataaaataaattaagtccagtgtttgagccaaggttgccacctgtctcttaacatctcactgaacataagtcctgaggtattaggacgaccatactgcctctgagctgaaaacattcaaaagttcacatccctgtttgggggataccattcaccgccttcagcccagatgatactttcctttaaatctgtgtctctgtgtgtataacaaagaggaagatggaaacaatgttcatggaaactgctgttgagccccttgtcccaccactcccgccatctgctgcaggcaggaaggcatgtgagtgtacgttttcttccaggagacatcaggtccccctggattcaaattaagtgcaatattttgcaaacagctcttcttagggaaatctcctgaaggaaaaaaatgtgacagaatgttccatagtctgagagaatggaatcgttgagcatttagtacaagtccagtgtgtgtgagcgggacttaggcagctcaagcttgcttttttttttaagcgtacaattgagtggttttagtaaattcacaaacttgttcaaccatcaccactatctaattccagactcacgcttttttaaacaataaatgtcatttcatgaaatctttggtgataaagtattttggattcagagaagagctcccttaccagtcccaccctgatctcatggctgtctctcctttcattgtcagactccccctggtctaccgcgttgatgtgtatacactgatctttcaagtctgggagacagataaggaggccaggtgcaaggcagggaggcagagagaatgttgtgcttcctttagcttttgtatttcgatggccagcattaccctttacctgtgggcatcagactcagcgtgggctgagtgctgagtgtaacttacactcctaaatcaagctggggcctgggtgggcccctcttggtatctgtgaatctttccaagcaccacttcggacacaccagggattgagtgctgctgttagtttagagaaggagagatgtctaacccttgaggtgaagggctctgggagggtccaagaagacgtaggcttcattttcacaccagcccacaccattccagtgctcagcctagcaaatgtgctttaatgcacacttctcagagctgtgatccgtgtatcttctccccagtgacagaagtagagaagagaatggaaagcagcacactccgtcccctctagtctggagctgttaacagaatctgctagaaactagctttattctaacataccgtaggatctaaatcctcctacctggatcatgaattcctttgaaataattcatattttcattgactctcactaaatgtcaaataaccttgttttcacttggataggctcaacctacctggcatatttattttgcagtcttgttgaaagttcatgaaactttgtactttttaataagatgatacactcgaaggaaacttttaatctctgcagtttattctctcttaaggaataaacactcccactgtttgttctcttcaatgtgtaaggagattaaatgacattttagaaatattacaattaaaaatagtgatgtagctgtaacatatgctggaattggatatttaatttatgtttgtgtcaactataatcctttccccacccctttcatttatggtaaacatcttgggcaaacccaaagatggaaagtgcttgttgggtgggtaagcaccacctggtctctcagcaaacactcctgagtggttgaagatgctggacattggattctagcactgggtttatctggtgacatagtctcctgtgggtcttgagttggttatttcaagctcaaactctgaatatgattaaaccagaacaccccacccccaactgccaaaaaaaaaaaaaaaa

SEQ ID NO: 149 - DNA, 3063 bp, Homo sapiens
cgccggcggggaagatgaccgcgggcgccggcgtgctccttctgctgctctcgctctccggcgcgctccgggcccataatgaggatcttacaactagagagacctgcaaggctgggttctctgaagatgattacacggcattaatctcccaaaatattctagaaggggaaaagctacttcaagtcaagttcagcagctgtgtggggaccaaggggacacaatatgagaccaacagcatggacttcaaagttggggcagatgggacagtcttcgccacccgggagctgcaggtcccctccgagcaggtggcgttcacggtgactgcatgggacagccagacagcagagaaatgggacgccgtggtgcggttgctggtggcccagacctcgtccccgcactctggacacaagccgcagaaaggaaagaaggtcgtggctctggacccctctccgcctccgaaggacaccctgctgccgtggccccagcaccagaacgccaacgggctgaggcggcgcaaacgggactgggtcatcccgcccatcaacgtgcccgagaactcgcgcgggcccttcccgcagcagctcgtgaggatccggtccgacaaagacaatgacatccccatccggtacagcatcacgggagtgggcgccgaccagccccccatggaggtcttcagcattgactccatgtccggccggatgtacgtcacaaggcccatggaccgggaggagcacgcctcttaccacctccgagcccacgctgtggacatgaatggcaacaaggtggagaaccccatcgacctgtacatctacgtcatcgacatgaatgacaaccgccctgagttcatcaaccaggtctacaacggctccgtggacgagggctccaagccaggcacctacgtgatgaccgtcacggccaacgatgctgacgacagcaccacggccaacgggatggtgcggtaccggatcgtgacccagaccccacagagcccgtcccagaatatgttcaccatcaacagcgagactggagatatcgtcacagtggcggctggcctggaccgagagaaagttcagcagtacacagtcatcgttcaggccacagatatggaaggaaatctcaactatggcctctcaaacacagccacagccatcatcacggtgacagatgtgaatgacaacccgccagaatttaccgccagcacgtttgcaggggaggtccccgaaaaccgcgtggagaccgtggtcgcaaacctcacggtgatggaccgagatcagccccactctccaaactggaatgccgtttaccgcatcatcagtggggatccatccgggcacttcagcgtccgcacagaccccgtaaccaacgagggcatggtcaccgtggtgaaggcagtcgactacgagctcaacagagctttcatgctgacagtgatggtgtccaaccaggcgcccctggccagcggaatccagatgtccttccagtccacggcaggggtgaccatctccatcatggacatcaacgaggctccctacttcccctcaaaccacaagctgatccgcctggaggagggcgtgccccccggcaccgtgctgaccacgttttcagctgtggaccctgaccggttcatgcagcaggctgtgagatactcaaagctgtcagacccagcgagctggctgcacatcaatgccaccaacggccagatcaccacggcggcagtgctggaccgtgagtccctctacaccaaaaacaacgtctacgaggccaccttcctggcagctgacaatgggatacccccggccagcggcaccgggaccctccagatctatctcattgacatcaacgacaacgcccctgagctgctgcccaaggaggcgcagatctgcgagaagcccaacctgaacgccatcaacatcacggcggccgacgctgacgtcgaccccaacatcggcccctacgtcttcgagctgccctttgtcccggcggccgtgcggaagaactggaccatcacccgcctgaacggtgactatgcccaactcagcttgcgcatcctgtacctggaggccgggatgtatgacgtccccatcatcgtcacagactctggaaaccctcccctgtccaacacgtccatcatcaaagtcaaggtgtgcccatgtgatgacaacggggactgcaccaccattggcgcagtggcagcggctggtctgggcaccggtgccatcgtggccatcctcatctgcatcctcatcctgctgaccatggtcctgctgtttgtcatgtggatgaagcggcgagagaaggagcgccacacgaagcagctgctcattgaccccgaggacgacgtccgcgacaacatcctcaagtatgacgaggaaggcggtggcgaggaggaccaggactacgacctcagccagctgcagcagccggaagccatggggcacgtgccaagcaaagcccctggcgtgcgtcgcgtggatgagcggccggtgggcgctgagccccagtacccgatcaggcccatggtgccgcacccaggcgacatcggtgacttcatcaatgagggactccgcgctgctgacaacgaccccacggcacccccctatgactccctgctggtcttcgactacgaggggagcggctccaccgcaggctccgtcagctccctgaactcatccagttccggggaccaagactacgattacctcaacgactgggggcccagattcaagaagctggcggacatgtatggaggtggtgaagaggattgactgacctcgcatcttcggaccgaagtgagagccgtgctcggacgccggaggagcaggactgagcagaggcggccggtcttcccgactccctgcggctgtgtccttagtgctgttaggaggccccccaatccccacgttgagctgtctagcatgagcacccacccccacagcgccctgcacccggccgctgcccagcaccgcgctggctggcactgaaggacagcaagaggcactctgtcttcacttgaatttcctagaacagaagcactgtttttaaaaaaaaaaaaaaaaaaagaag

SEQ ID NO: 150 - DNA, 2950 bp, Homo sapiens
gcaggctgctgtctcacagagcgagaaggtgtcaggagcagcccagttgtgtctctctctctacctctgtgaagggcgcgaatgggcagagcagaacttctagaagggaagatgagcacccaggatccctcagatctgtggagcagatccgatggagaggctgagctgctccaggacttggggtggtatcacggcaacctcacacgccatgctgctgaagctcttctcctctcaaatggatgtgacggcagctaccttctgagggacagcaatgagaccaccgggctgtactctctctctgtgagggccaaagattctgttaaacactttcatgttgaatatactggatattcatttaaatttggctttaatgaattctcatctttgaaggattttgtcaagcattttgcaaatcagcctttgattggaagcgagacaggcactctgatggttctaaaacatccctacccaagaaaagtggaagaaccctccatttatgaatctgtccgggttcacacagcaatgcagacaggaagaacagaagatgaccttgtgcccacagcaccttctctgggcaccaaagaaggttacctcaccaaacagggaggcctggtcaagacctggaaaacaagatggtttactctgcacaggaatgaactgaaatacttcaaagaccagatgtcaccagaaccaattcggatcctagacctaacagaatgttcagctgtacaattcgattattcacaagaaagggtaaactgtttttgtttggtatttccattcaggacattttatctctgtgcaaagaccggagtagaagctgatgagtggatcaagatattacgctggaaattggtcaaggacaaaagctgtattttgtctgctctctgtatatctcccgaggagaagactgatcacaaataagaaaacagctcaaccaaggggaaggcacgatccgatctcggtcgttcatctttaaatagatctttcttgccaaggaatgctctggcccaggagcaaggtggaatgtttccctgacgctgtgatctgcagcaggcttcaaatgaaaaccgactaaggattttctttcaaaaacaaatcagaagcagatgctgattgggacccatataccacgttgctgactcacgttgctgcccttccatgatgttgccatctccttgagaacactgaagcaatcaccattctgatagaaagtgcttaaaccaccactcttaggtctgctcactcttagaacacacaatggaagaggaagggtttttgttttcactcattgtggtccccaagcctattgacactagttgcctagagtcccactgtgagtcatggtcagcctgtctgacatccaggttgtgctattaaccaagaaggaaacagatacttggaggcttagatgacttctgcaggatttatattcagatagaaaacatcaaatattttcaggggagaggtttttttttttaatttttccccctttatacaaaaaaaaagaacatttccaaaactaaaatagaaaatgcttgtggcatttattttctctttttaaaaggttcagaaatttggcaggtcctttgcttctaatgacaaaactgtgagagctagatgtcctatgggcaattaggtagtataataaaggtaaatgaaggtacaatttttaaaccattattttcaccctgttggggtaaatgttttaaagagtgagaaaacataaattgagaaagggtgataaagtaatagataacttttagtttaataataattattgttattatactactaataatagagcacttgtaagcactaagttatctttatccaacatttctccaaatggactgaaagaaacttttcaaggacagtgtattataacaatccctttcccagaattagttgtatagggttggcccaagagatgtaagaaaaatctcgcattgctccctaagcaccctgggccttattaaagagcaacttctatttccagtcgggggagtaacactaaagctacaagaaatatgtaataatgataggtaataatgtgttccaaagctttttcaaactagaataaggaggcaaatagaagaatgagatactgatgtccacagttcattggcagaatctaaccccttctgttatcttttttaatactatttttgtttagatagaagtttcaaagaagataaaaatgcttgaagagcctgagagtaaaaagattatgctgcaaagctatgatataaactgctcttgcagtccaaagggatacctgattaaagaagtttcttatttaaacatctcagacgcaaaaattacattaaatttttgtatatttcaacaacattttaaatgtattttgttatgtttgtattatataggataaagcaaatgtcaagttaaaatgtattgtgttgtttgtaaagtaagaagttactggccaggagcggcggctcatgcctgtaatcccaggactttggtaggccaagacaagcagatcacttgaggtcaggagttcaacatcagcctggccaacatgatgaaaccttgtctttactaaaaatacaaaaattagctgggcatggtggcaggcgcctgtaatcccagctactcaggaggctgaggcaggagaattgcttgaacccgggaggtggaggttgcagtgaaccaagatcgcggcgctgcactctagcctgggtgacagagtcagactccgtcccaaaaaaacaaacaaacaaaacaaaacaaaaaaaacagaagttacaaatgaatactcacggatatgtatagttttatgtttgttttcttagaaacaaatgtgtttctttgggtgggtaatattgtgttttactatgtttaccttttataaaacataacctgtttatttatattctttggctttgtttattaaaaagcatgattttgctgtgcatgtaccattttg

SEQ ID NO: 151 - DNA, 2158 bp, Homo sapiens
ccgttgccgccgccgccgctgccgccgtgctctcgctttgcccgccgccgcctaaggggggctggggccggggccagccatcactgccgttgccgggatgccgcgggtgtacatcggccgcctgagctaccaggcccgggagcgcgatgtggagcgcttctttaagggctacgggaagatcctggaggtggatctgaagaacggatatggttttgtggagtttgatgatctgcgtgatgcagatgatgctgtttatgaactgaatggcaaagacctttgtggtgagcgagtaattgttgagcatgcccgcggcccacggcgagatggcagttacggttctggacgcagtggatatggttatagaagaagtggccgagataaatatggccctcctactcgcacagagtacagacttattgtggagaatttgtcaagtcggtgcagctggcaagacctaaaggattatatgcgtcaggcaggagaagtgacttatgcagatgctcacaagggacgcaaaaatgaaggggtgattgaatttgtatcttattctgatatgaaaagagctttggaaaagttggatggaactgaagtcaatgggagaaaaatcagattagttgaagacaagccaggttccagacgacgccggtcctactccagaagccggagtcattcaaggtctcgctctcgaagcagacattcccgtaagagcagaagccgaagtggcagcagcaaaagcagtcattctaagagtagatctcggtccaggtcgggctcccgctcccggagcaagagccggagccggagccagagtcggagccggagcaagaaagagaaaagcaggagccccagcaaggaaaagagccgcagccgcagccatagcgctggcaagagccgcagcaagagcaaagaccaagctgaagagaagatccaaaacaatgacaatgtcgggaaacccaagagccggagtcctagcaggcataaaagtaagagcaaaagtcggagcaggagtcaggagaggagagtggaggaggagaagcgagggagtgtgagcaggggcaggagccaggagaagagcctccgccagagtcggagccggagcaggagcaaagggggcagcaggagccggagcaggagccgcagcaagagcaaggacaagaggaagggcaggaagagaagcagagaggagagccgcagtcgcagtcgcagccgcagcaagagtgagaggagcagaaagcgaggcagcaagcgagacagcaaggcgggcagcagcaagaagaagaagaaggaagacactgaccgctcccagtccagatctccatcccgctccgtgtcaaaggagcgggaacatgccaagtctgaatccagccagagggaaggtcgaggagagagtgagaatgctggcaccaatcaggagacccggtccaggtcgagatccaattccaaatcgaaaccaaaccttccatcagaatcacgctccagatcaaagtcagcttcaaaaacccgatctcggtccaagtctagatccaggtctgcttccagatcgccctcccgatctagatctaggtcccactcaaggtcctaactggctatggccacagctggaactacccgagaagtcttttgtacatgtttggtagccgtagcacaagtgattggagtagaacatgtcactgctgtacatttttaactcccctaatggtgtgtctataattgttaaatctaagtgcttcctctcagtaaagcctcctggcaccaggccttcctgctcgactgaaaaaaattttctctttgaaaatccccttttactcatggcccacagtagaatatccaaaacgccttggctttcaggcctggcctttcctacagggagctcagtaacctggacggctctaaggctggaatgaccacataggtaggtatggtgagttcaaccatttttgctcttgaattgatgcccttcgatgtatgccatttagtgaaagtgctaagtcttaagtttcctaccactttggtttcatatttttggacttaacaaagttgtgaatagcacagtcgaggaaaattgatacctgcagtaacccataggaaataaactgtagagttccatattctggtattgtgattatattgttttatattaaaaaaaaaaaaaaaaaaa

SEQ ID NO: 152 - DNA, 10692 bp, Homo sapiens
gaggagagagcagagtataccgcagacatcatttctactacagtggcggagccgtacaggacctgtttcactgcagggggatccaaaacaagccccgtggagcagcagccagagcaacagcagccgcaagacattgtttctctccctctgcccccccttccccacgcaaccccagatccatttacactttacagttttacctcacaaaaactactacaagcaccaagctccctgatggaaaggagcatcgtgcatcaagtcaccagggtggtccattcaagctgcagatttgtttgtcatccttgtacagcaatctcctcctccactgccactacagggaagtgcatcacatgtcagcatactggagcatagtgaaagagtctattttgaagcttcaaacttagtgctgctgcagaccaggaacaagagagaaagagtggatttcagcctgcacggatggtcttgaaacacaaatggtttttggtctaggcgttttacactgagattctccactgccaccctttctactcaagcaaaatcttcgtgaaaagatctgctgcaaggaactgatagcttatggttctccattgtgatgaaagcacatggtacagttttccaaagaaattagaccattttcttcgtgagaaagaaatcgacgtgctgttttcatagggtatttctcacttctctgtgaaaggaagaaagaacacgcctgagcccaagagccctcaggagccctccagagcctgtgggaagtctccatggtgaagtataggctgaggctacctgtgaacagtacgcagtgaatgttcatccagagctgctgttggcggattgtacccacggggagatgattcctcatgaagagcctggatcccctacagaaatcaaatgtgactttccgtttatcagactaaaatcagagccatccagacagtgaaacagtcaccgtggaggggggacggcgaaaaatgaaatccaaccaagagcggagcaacgaatgcctgcctcccaagaagcgcgagatccccgccaccagccggtcctccgaggagaaggcccctaccctgcccagcgacaaccaccgggtggagggcacagcatggctcccgggcaaccctggtggccggggccacgggggcgggaggcatgggccggcagggacctcggtggagcttggtttacaacagggaataggtttacacaaagcattgtccacagggctggactactccccgcccagcgctcccaggtctgtccccgtggccaccacgctgcctgccgcgtacgccaccccgcagccagggaccccggtgtcccccgtgcagtacgctcacctgccgcacaccttccagttcattgggtcctcccaatacagtggaacctatgccagcttcatcccatcacagctgatccccccaaccgccaaccccgtcaccagtgcagtggcctcggccgcaggggccaccactccatcccagcgctcccagctggaggcctattccactctgctggccaacatgggcagtctgagccagacgccgggacacaaggctgagcagcagcagcagcagcagcagcagcagcagcagcagcatcagcatcagcagcagcagcagcagcagcagcagcagcagcagcagcagcacctcagcagggctccggggctcatcaccccggggtcccccccaccagcccagcagaaccagtacgtccacatttccagttctccgcagaacaccggccgcaccgcctctcctccggccatccccgtccacctccacccccaccagacgatgatcccacacacgctcaccctggggcccccctcccaggtcgtcatgcaatacgccgactccggcagccactttgtccctcgggaggccaccaagaaagctgagagcagccggctgcagcaggccatccaggccaaggaggtcctgaacggtgagatggagaagagccggcggtacggggccccgtcctcagccgacctgggcctgggcaaggcaggcggcaagtcggttcctcacccgtacgagtccaggcacgtggtggtccacccgagcccctcagactacagcagtcgtgatccttcgggggtccgggcctctgtgatggtcctgcccaacagcaacacgcccgcagctgacctggaggtgcaacaggccactcatcgtgaagcctccccttctaccctcaacgacaaaagtggcctgcatttagggaagcctggccaccggtcctacgcgctctcaccccacacggtcattcagaccacacacagtgcttcagagccactcccggtgggactgccagccacggccttctacgcagggactcaaccccctgtcatcggctacctgagcggccagcagcaagcaatcacctacgccggcagcctgccccagcacctggtgatccccggcacacagcccctgctcatcccggtcggcagcactgacatggaagcgtcgggggcagccccggccatagtcacgtcatccccccagtttgctgcagtgcctcacacgttcgtcaccaccgcccttcccaagagcgagaacttcaaccctgaggccctggtcacccaggccgcctacccagccatggtgcaggcccagatccacctgcctgtggtgcagtccgtggcctccccggcggcggctccccctacgctgcctccctacttcatgaaaggctccatcatccagttggccaacggggagctaaagaaggtggaagacttaaaaacagaagatttcatccagagtgcagagataagcaacgacctgaagatcgactccagcaccgtagagaggattgaagacagccatagcccgggcgtggccgtgatacagttcgccgtcggggagcaccgagcccaggtcagcgttgaagttttggtagagtatcctttttttgtgtttggacagggctggtcatcctgctgtccggagagaaccagccagctctttgatttgccgtgttccaaactctcagttggggatgtctgcatctcgcttaccctcaagaacctgaagaacggctctgttaaaaagggccagcccgtggatcccgccagcgtcctgctgaagcactcaaaggccgacggcctggcgggcagcagacacaggtatgccgagcaggaaaacggaatcaaccaggggagtgcccagatgctctctgagaatggcgaactgaagtttccagagaaaatgggattgcctgcagcgcccttcctcaccaaaatagaacccagcaagcccgcggcaacgaggaagaggaggtggtcggcgccagagagccgcaaactggagaagtcagaagacgaaccacctttgactcttcctaagccttctctaattcctcaggaggttaagatttgcattgaaggccggtctaatgtaggcaagtagaggcagcgtgggggaaaggaaacgtggctctcccttatcatttgtatccagattactgtactgtaggctaaaataacacagtatttacatgttatcttcttaattttaggtttctgttctaaccttgtcattagagttacagcaggtgtgtcgcaggagactggtgcatatgctttttccacgagtgtctgtcagtgagcgggcgggaggaagggcacagcaggagcggtcagggctccaggcatccccggggaagaaaggaacggggcttcacagtgcctgccttctctagcggcacagaagcagccgggggcgctgactcccgctagtgtcaggagaaaagtcccgtgggaagagtcctgcaggggtgcagggttgcacgcatgtgggggtgcacaggcgctgtggcggcgagtgagggtctctttttctctgcctccctctgcctcactctcttgctatcggcatgggccgggggggttcagagcagtgtcctcctggggttcccacgtgcaaaatcaacatcaggaacccagcttcagggcatcgcggagacgcgtcagatggcagatttggaaagttaaccatttaaaagaacatttttctctccaacatattttacaataaaagcaacttttaattgtatagatatatatttccccctatggggcctgactgcactgatatatattttttttaaagagcaactgccacatgcgggatttcatttctgctttttactagtgcagcgatgtcaccagggtgttgtggtggacagggaagcccctgctgtcatggccccacatggggtaaggggggttgggggtgggggagagggagagagcgaacacccacgctggtttctgtgcagtgttaggaaaaccaatcaggttattgcattgacttcactcccaagaggtagatgcaaactgcccttcagtgagagcaacagaagctcttcacgttgagtttgcgaaatctttttgtctttgaactctagtactgtttatagttcatgactatggacaactcgggtgccactttttttttttttcagattccagtgtgacatgaggaattagattttgaagatgagcatatattactatctttaagcatttaaaaatactgttcacactttattaccaagcatcttggtctctcattcaacaagtactgtatctcactttaaactctttggggaaaaaacaaaaacaaaaaaaactaagttgctttctttttttcaacactgtaactacatttcagctctgcagaattgctgaagagcaagatattgaaagtttcaatgtggtttaaagggatgaatgtgaattatgaactagtatgtgacaataaatgaccaccaagtactacctgacgggaggcacttttcactttgatgtctgagaatcagttcaaggcatatgcagagttggcagagaaactgagagaaaagggatggagaagagaatactcatttttgtccagtgtttttctttttaagatgaacttttaaagaaccttgcgatttgcacatattgagtttataacttgtgtgatattcctgcagtttttatccaataacattgtgggaaaggtttgggggactgaacgagcataaataaatgtagcaaaatttctttctaacctgcctaaactctaggccattttataaggttatgttcctttgaaaattcattttggtctttttaccacatctgtcacaaaaagccaggtcttagcgggctcttagaaactctgagaattttcttcagattcattgagagagttttccataaagacatttatatatgtgagcaagattttttttaaacaattactttattattgttgttattaatgttattttcagaatggcttttttttttctattcaaaatcaaatcgagatttaatgtttggtacaaacccagaaagggtatttcatagtttttaaacctttcattcccagagatccgaaatatcatttgtgggttttgaatgcatctttaaagtgctttaaaaaaaagttttataagtagggagaaatttttaaatattcttacttggatggctgcaactaaactgaacaaatacctgacttttcttttaccccattgaaaatagtactttcttcgtttcacaaattaaaaaaaaaatctggtatcaacccacattttggctgtctagtattcatttacatttagggttcaccaggactaatgatttttataaaccgttttctggggtgtaccaaaaacatttgaataggtttagaatagctagaatagttccttgactttcctcgaatttcattaccctctcagcatgcttgcagagagctgggtgggctcattcttgcagtcatactgcttatttagtgctgtattttttaaacgtttctgttcagagaacttgcttaatcttccatatattctgctcagggcacttgcaattattaggttttgtttttctttttgttttttagcctttgatggtaagaggaatacgggctgccacatagactttgttctcattaatatcactatttacaactcatgtggactcagaaaaacacacaccaccttttggcttacttcgagtattgaattgactggatccactaaaccaacactaagatgggaaaacacacatggtttggagcaataggaacatcatcataatttttgtggttctatttcaggtataggaattataaaataattggttctttctaaacacttgtcccatttcattctcttgcttttttagcatgtgcaatactttctgtgccaatagagtctgaccagtgtgctatatagttaaagctcattcccttttggctttttccttgtttggttgatcttccccattctggccagagcagggctggagggaaggagccaggagggagagagcctcccacctttcccctgctgcggatgctgagtgctggggcggggagccttcaggagccccgtgcgtctgccgccacgttgcagaaagagccagccaaggagacccgggggaggaaccgcagtgtcccctgtcaccacacggaatagtgaatgtggagtgtggagaggaaggaggcagattcatttctaagacgcactctggagccatgtagcctggagtcaacccattttccacggtcttttctgcaagtgggcaggcccctcctcggggtctgtgtccttgagacttggagccctgcctctgagcctggacgggaagtgtggcctgttgtgtgtgtgcgttctgagcgtgttggccagtggctgtggaggggaccacctgccacccacggtcaccactcccttgtggcagctttctcttcaaataggaagaacgcacagagggcaggagcctcctgtttgcagacgttggcgggccccgaggctcccagagcagcctctgtcaccgcttctgtgtagcaaacattaacgatgacaggggtagaaattcttcggtgccgttcagcttacaaggatcagccatgtgcctctgtactatgtccactttgcaatatttaccgacagccgtcttttgttctttctttcctgttttccatttttaaactagtaacagcaggccttttgcgtttacaatggaacacaatcaccaagaaattagtcagggcgaaaagaaaaaaataatactattaataagaaaccaacaaacaagaacctctctttctagggatttctaaatatataaaatgactgttccttagaatgtttaacttaagaattatttcagtttgtctgggccacactggggcagaggggggagggagggatacagagatggatgccacttacctcagatcttttaaagtggaaatccaaattgaattttcatttggactttcaggataattttctatgttggtcaacttttcgttttccctaactcacccagtttagtttgggatgatttgatttctgttgttgttgatcccatttctaacttggaattgtgagcctctatgttttctgttaggtgagtgtgttgggttttttccccccaccaggaagtggcagcatccctccttctcccctaaagggactctgcggaacctttcacacctctttctcagggacggggcaggtgtgtgtgtggtacactgacgtgtccagaagcagcactttgactgctctggagtagggttgtacaatttcaaggaatgtttggatttcctgcatcttgtggattactccttagataccgcatagattgcaatataatgctgcatgttcaagatgaacagtagctcctagtaatcataaaatccactctttgcacagtttgatctttactgaaatatgttgccaaaatttatttttgttgttgtagctctggattttgttttgttttgttttttaaggaaacgattgacaataccctttaacatctgtgactactaaggaaacctatttctttcatagagagaaaaatctccaatgcttttgaagacactaataccgtgctatttcagatatgggtgaggaagcagagctctcggtaccgaaggccgggcttcttgagctgtgttggttgtcatggctactgtttcatgaaccacaagcagctcaacagactggtctgttgccttctgaaaccctttgcacttcaatttgcaccaggtgaaaacagggccagcagactccatggcccaattcggtttcttcggtggtgatgtgaaaggagagaattacactttttttttttttaagtggcgtggaggcctttgcttccacatttgtttttaacccagaatttctgaaatagagaatttaagaacacatcaagtaataaatatacagagaatatacttttttataaagcacatgcatctgctattgtgttgggttggtttcctctcttttccacggacagtgttgtgtttctggcatagggaaactccaaacaacttgcacacctctactccggagctgagatttcttttacatagatgacctcgcttcaaatacgttaccttactgatgataggatcttttcttgtagcactataccttgtgggaatttttttttaaatgtacacctgatttgagaagctgaagaaaacaaaattttgaagcactcactttgaggagtacaggtaatgttttaaaaaattgcacaaaagaaaaatgaatgtcgaaatgattcattcagtgtttgaaagatatggctctgttgaaacaatgagtttcatactttgtttgtaaaaaaaaaaaagcagagaagggttgaaagttacatgtttttttgtatatagaaatttgtcatgtctaaatgatcagatttgtatggttatggcctggaagaattactacgtaaaaggctcttaaactatacctatgcttattgttatttttgttacatatagccctcgtctgagggaggggaactcggtattctgcgatttgagaatactgttcattcctatgctgaaagtacttctctgagctcccttcttagtctaaactcttaagccattgcaacttctttttcttcagagatgatgtttgacattttcagcacttcctgttcctataaacccaaagaatataatcttgaacacgaagtgtttgtaacaagggatccaggctaccaatcaaacaggactcattatggggacaaaaaaaaaaattatttcaccttctttccccccacacctcatttaaatggggggagtaaaaacatgatttcaatgtaaatgcctcattttattttagttttattttgatttttatttaatataaagaggccagaataaatacggagcatcttctcagaatagtattcctgtccaaaaatcaagccggacagtggaaactggacagctgtggggatattaagcacccccacttacaattcttaaattcagaatctcgtcccctcccttctcgttgaaggcaactgttctggtagctaactttctcctgtgtaatggcgggagggaacaccggcttcagtttttcatgtccccatgacttgcatacaaatggttcaactgtattaaaattaagtgcatttggccaataggtagtatctatacaataacaacaatctctaagaatttccataacttttcttatctgaaaggactcaagtcttccactgcagatacattggaggcttcacccacgttttctttccctttagtttgtttgctgtctggatggccaatgagcctgtctccttttctgtggccaatctgaaggccttcgttggaagtgttgtttacagtaatccttaccaagataacatactgtcctccagaataccaagtattaggtgacactagctcaagctgttgtcttcagagcagttaccaagaagctcggtgcacaggttttctctggttcttacaggaaccacctactctttcagttttctggcccaggagtggggtaaatcctttagttagtgcatttgaacttgatacctgtgcattcagttctgtgaatactgccctttttggcggggtttcctcatctccccagcctgaactgctcaactctaaacccaaattagtgtcagccgaaaggaggtttcaagatagtcctgtcagtatttgtggtgaccttcagattagacagtcttcatttccagccagtggagtcctggctccagagccatctctgagactcgtactactggatgttttaatatcagatcattacccaccatatgcctcccacaggccaagggaaaacagacaccagaacttgggttgagggcactaccagactgacatggccagtacagaggagaactagggaaggaatgatgttttgcaccttattgaaaagaaaattttaagtgcatacataatagttaagagcttttattgtgacaggagaacttttttccatatgcgtgcatactctctgtaattccagtgtaaaatattgtacttgcactagcttttttaaacaaatattaaaaaatggaagaattcatattctattttctaatcgtggtgtgtctatttgtaggatacactcgagtctgtttattgaattttatggtccctttctttgatggtgcttgcaggttttctaggtagaaattatttcattattataataaaacaatgtttgattcaaaatttgaacaaaattgttttaaataaattgtctgtataccagtacaagtttattgtttcagtatactcgtactaataaaataacagtgccaattgcaaaaaaaaaaaaaaaaaaaaaaaaaaaaaaaaaaaaaaaaaaaaaaaaaaaaaaaaa

SEQ ID NO: 153 - DNA, 11426 bp, Homo sapiens
agacccgccgggctcccgccgcgcgcgctgtccctggagctcggggacgcggcccggagccgggaagatggcgaagcggctctgcgcggggagcgcactgtgtgttcgcggcccccggggccccgcgccgctgctgctggtcgggctggcgctgctgggcgcggcgcgggcgcgggaggaggcgggcggcggcttcagcctgcacccgccctacttcaacctggccgagggcgcccgcatcgccgcctccgcgacctgcggagaggaggccccggcgcgcggctccccgcgccccaccgaggacctttactgcaagctggtagggggccccgtggccggcggcgaccccaaccagaccatccggggccagtactgtgacatctgcacggctgccaacagcaacaaggcacaccccgcgagcaatgccatcgatggcacggagcgctggtggcagagtccaccgctgtcccgcggcctggagtacaacgaggtcaacgtcaccctggacctgggccaggtcttccacgtggcctacgtcctcatcaagtttgccaactcaccccggccggacctctgggtgctggagcggtccatggacttcggccgcacctaccagccctggcagttctttgcctcctccaagagggactgtctggagcggttcgggccacagacgctggagcgcatcacacgggacgacgcggccatctgcaccaccgagtactcacgcatcgtgcccctggagaacggagagatcgtggtgtccctggtgaacggacgtccgggcgccatgaatttctcctactcgccgctgctacgtgagttcaccaaggccaccaacgtccgcctgcgcttcctgcgtaccaacacgctgctgggccatctcatggggaaggcgctgcgggaccccacggtcacccgccggtattattacagcatcaaggatatcagcatcggaggccgctgtgtctgccacggccacgcggatgcctgcgatgccaaagaccccacggacccgttcaggctgcagtgcacctgccagcacaacacctgcgggggcacctgcgaccgctgctgccccggcttcaatcagcagccgtggaagcctgcgactgccaacagtgccaacgagtgccagtcctgtaactgctacggccatgccaccgactgttactacgaccctgaggtggaccggcgccgcgccagccagagcctggatggcacctatcagggtgggggtgtctgtatcgactgccagcaccacaccaccggcgtcaactgtgagcgctgcctgcccggcttctaccgctctcccaaccaccctctcgactcgccccacgtctgccgccgctgcaactgcgagtccgacttcacggatggcacctgcgaggacctgacgggtcgatgctactgccggcccaacttctctggggagcggtgtgacgtgtgtgccgagggcttcacgggcttcccaagctgctacccgacgccctcgtcctccaatgacaccagggagcaggtgctgccagccggccagattgtgaattgtgactgcagcgcggcagggacccagggcaacgcctgccggaaggacccaagggtgggacgctgtctgtgcaaacccaacttccaaggcacccattgtgagctctgcgcgccagggttctacggccccggctgccagccctgccagtgttccagccctggagtggccgatgaccgctgtgaccctgacacaggccagtgcaggtgccgagtgggcttcgagggggccacatgtgatcgctgtgcccccggctactttcacttccctctctgccagttgtgtggctgcagccctgcaggaaccttgcccgagggctgcgatgaggccggccgctgcctatgccagcctgagtttgctggacctcattgtgaccggtgccgccctggctaccatggtttccccaactgccaagcatgcacctgcgaccctcggggagccctggaccagctctgtggggcgggaggtttgtgccgctgccgccccggctacacaggcactgcctgccaggaatgcagccccggctttcacggcttccccagctgtgtcccctgccactgctctgctgaaggctccctgcacgcagcctgtgacccccggagtgggcagtgcagctgccggccccgtgtgacggggctgcggtgtgacacatgtgtgcccggtgcctacaacttcccctactgcgaagctggctcttgccaccctgccggtctggccccagtggatcctgcccttcctgaggcacaggttccctgtatgtgccgggctcacgtggaggggccgagctgtgaccgctgcaaacctgggttctggggactgagccccagcaaccccgagggctgtacccgctgcagctgcgacctcaggggcacactgggtggagttgctgagtgccagccgggcaccggccagtgcttctgcaagccccacgtgtgcggccaggcctgcgcgtcctgcaaggatggcttctttggactggatcaggctgactattttggctgccgcagctgccggtgtgacattggcggtgcactgggccagagctgtgaaccgaggacgggcgtctgccggtgccgccccaacacccagggccccacctgcagcgagcctgcgagggaccactacctcccggacctgcaccacctgcgcctggagctggaggaggctgccacacctgagggtcacgccgtgcgctttggcttcaaccccctcgagttcgagaacttcagctggaggggctacgcgcagatggcacctgtccagcccaggatcgtggccaggctgaacctgacctcccctgaccttttctggctcgtcttccgatacgtcaaccggggggccatgagtgtgagcgggcgggtctctgtgcgagaggagggcaggtcggccacctgcgccaactgcacagcacagagtcagcccgtggccttcccacccagcacggagcctgccttcatcaccgtgccccagaggggcttcggagagccctttgtgctgaaccctggcacctgggccctgcgtgtggaggccgaaggggtgctcctggactacgtggttctgctgcctagcgcatactacgaggcggcgctcctgcagctgcgggtgactgaggcctgcacataccgtccctctgcccagcagtctggcgacaactgcctcctctacacacacctccccctggatggcttcccctcggccgccgggctggaggccctgtgtcgccaggacaacagcctgccccggccctgccccacggagcagctcagcccgtcgcacccgccactgatcacctgcacgggcagtgatgtggacgtccagcttcaagtggcagtgccacagccaggccgctatgccctagtggtggagtacgccaatgaggatgcccgccaggaggtgggcgtggccgtgcacaccccacagcgggccccccagcaggggctgctctccctgcacccctgcctgtacagcaccctgtgccggggcactgcccgggatacccaggaccacctggctgtcttccacctggactcggaggccagcgtgaggctcacagccgaacaggcacgcttcttcctgcacggggtcactctggtgcccattgaggagttcagcccggagttcgtggagccccgggtcagctgcatcagcagccacggcgcctttggccccaacagtgccgcctgtctgccctcgcgcttcccaaagccgccccagcccatcatcctcagggactgccaggtgatcccgctgccgcccggcctcccgctgacccacgcgcaggatctcactccagccatgtccccagctggaccccgacctcggccccccaccgctgtggaccctgatgcagagcccaccctgctgcgtgagccccaggccaccgtggtcttcaccacccatgtgcccacgctgggccgctatgccttcctgctgcacggctaccagccagcccaccccaccttccccgtggaagtcctcatcaacgccggccgcgtgtggcagggccacgccaacgccagcttctgtccacatggctacggctgccgcaccctggtggtgtgtgagggccaggccctgctggacgtgacccacagcgagctcactgtgaccgtgcgtgtgcccaagggccggtggctctggctggattatgtactcgtggtccctgagaacgtctacagctttggctacctccgggaggagcccctggataaatcctatgacttcatcagccactgcgcagcccagggctaccacatcagccccagcagctcatccctgttctgccgaaacgctgctgcttccctctccctcttctataacaacggagcccgtccatgtggctgccacgaagtaggtgctacaggccccacgtgtgagcccttcgggggccagtgtccctgccatgcccatgtcattggccgtgactgctcccgctgtgccaccggatactggggcttccccaactgcaggccctgtgactgcggtgcccgcctctgtgacgagctcacgggccagtgcatctgcccgccacgcaccatcccgcccgactgcctgctgtgccagccccagacctttggctgccaccccctggtcggctgtgaggagtgtaactgctcagggcccggcatccaggagctcacagaccctacctgtgacacagacagcggccagtgcaagtgcagacccaacgtgactgggcgccgctgtgatacctgctctccgggcttccatggctacccccgctgccgcccctgtgactgtcacgaggcgggcactgcgcctggcgtgtgtgaccccctcacagggcagtgctactgtaaggagaacgtgcagggccccaaatgtgaccagtgcagccttgggaccttctcactggatgctgccaaccccaaaggttgcacccgctgcttctgctttggggccacggagcgctgccggagctcgtcctacacccgccaggagttcgtggatatggagggatgggtgctgctgagcactgaccggcaggtggtgccccacgagcggcagccagggacggagatgctccgtgcagacctgcggcacgtgcctgaggctgtgcccgaggctttccccgagctgtactggcaggccccaccctcctacctgggggaccgggtgtcatcctacggtgggaccctccgttatgaactgcactcagagacccagcggggagatgtctttgtccccatggagagcaggccggatgtggtgctgcagggcaaccagatgagcatcacattcctggagccggcataccccacgcctggccacgttcaccgtgggcagctgcagctggtggaggggaacttccggcatacggagacgcgcaacactgtgtcccgcgaggagctcatgatggtgctggccagcctggagcagctgcagatccgtgccctcttctcacagatctcctcggctgtcttcctgcgcagggtggcactggaggtggccagcccagcaggccagggggccctggccagcaatgtggagctgtgcctgtgccccgccagctaccggggggactcatgccaggaatgtgcccccggcttctatcgggacgtcaaaggtctcttcctgggccgatgtgtcccttgtcagtgccatggacactcagaccgctgcctccctggctctggcgtctgtgtggactgccagcacaacaccgaaggggcccactgtgagcgctgccaggctggcttcgtgagcagcagggacgaccccagcgccccctgtgtcagctgcccctgccccctctcagtgccttccaacaacttcgccgagggctgtgtcctgcgaggcggccgcacccagtgcctctgcaaacctggttatgcaggtgcctcctgcgagcggtgtgcgcccggattctttgggaacccactggtgctgggcagctcctgccagccatgcgactgcagcggcaacggtgaccccaacttgctcttcagcgactgcgaccccctgacgggcgcctgccgtggctgcctgcgccacaccactgggccccgctgcgagatctgtgcccccggcttctacggcaacgccctgctgcccggcaactgcacccggtgcgactgtaccccatgtgggacagaggcctgcgacccccacagcgggcactgcctgtgcaaggcgggcgtgactgggcggcgctgtgaccgctgccaggagggacattttggtttcgatggctgcgggggctgccgcccgtgtgcttgtggaccggccgccgagggctccgagtgccacccccagagcggacagtgccactgccgaccagggaccatgggaccccagtgccgcgagtgtgcccctggctactgggggctccctgagcagggctgcaggcgctgccagtgccctgggggccgctgtgaccctcacacgggccgctgcaactgccccccggggctcagcggggagcgctgcgacacctgcagccagcagcatcaggtgcctgttccaggcgggcctgtgggccacagcatccactgtgaagtgtgtgaccactgtgtggtcctgctcctggatgacctggaacgggccggcgccctcctccccgccattcacgagcaactgcgtggcatcaatgccagctccatggcctgggcccgtctgcacaggctgaacgcctccatcgctgacctgcagagccagctccggagccccctgggcccccgccatgagacggcacagcagctggaggtgctggagcagcagagcacaagcctcgggcaggacgcacggcggctaggcggccaggccgtggggacccgagaccaggcgagccaattgctggccggcaccgaggccacactgggccatgcgaagacgctgttggcggccatccgggctgtggaccgcaccctgagcgagctcatgtcccagacgggccacctggggctggccaatgcctcggctccatcaggtgagcagctgctccggacactggccgaggtggagcggctgctctgggagatgcgggcccgggacctgggggccccgcaggcagcagctgaggctgagttggctgcagcacagagattgctggcccgggtgcaggagcagctgagcagcctctgggaggagaaccaggcactggccacacaaacccgcgaccggctggcccagcacgaggccggcctcatggacctgcgagaggctttgaaccgggcagtggacgccacacgggaggcccaggagctcaacagccgcaaccaggagcgcctggaggaagccctgcaaaggaagcaggagctgtcccgggacaatgccaccctgcaggccactctgcatgcggctagggacaccctggccagcgtcttcagattgctgcacagcctggaccaggctaaggaggagctggagcgcctcgccgccagcctggatggggctcggaccccactgctgcagaggatgcagaccttctccccggcgggcagcaagctgcgtctagtggaggccgccgaggcccacgcacagcagctgggccagctggcactcaatctgtccagcatcatcctggacgtcaaccaggaccgcctcacccagagggccatcgaggcctccaacgcctacagccgcatcctgcaggccgtgcaggctgccgaggatgctgctggccaggccctgcagcaggcggaccacacgtgggcgacggtggtgcggcagggcctggtggaccgagcccagcagctcctggccaacagcactgcactagaagaggccatgctccaggaacagcagaggctgggccttgtgtgggctgccctccagggtgccaggacccagctccgagatgtccgggccaagaaggaccagctggaggcgcacatccaggcggcgcaggccatgcttgccatggacacagacgagacaagcaagaagatcgcacatgccaaggctgtggctgctgaagcccaggacaccgccacccgtgtgcagtcccagctgcaggccatgcaggagaatgtggagcggtggcagggccagtacgagggcctgcggggccaggacctgggccaggcagtgcttgacgcaggccactcagtgtccaccctggagaagacgctgccccagctgctggccaagctgagcatcctggagaaccgtggggtgcacaacgccagcctggccctgtccgccagcattggccgcgtgcgagagctcattgcccaggcccggggggctgccagtaaggtcaaggtgcccatgaagttcaacgggcgctcaggggtgcagctgcgcaccccacgggatcttgccgaccttgctgcctacactgccctcaagttctacctgcagggcccagagcctgagcctgggcagggtaccgaggatcgctttgtgatgtacatgggcagccgccaggccactggggactacatgggtgtgtctctgcgtgacaagaaggtgcactgggtgtatcagctgggtgaggcgggccctgcagtcctaagcatcgatgaggacattggggagcagttcgcagctgtcagcctggacaggactctccagtttggccacatgtccgtcacagtggagagacagatgatccaggaaaccaagggtgacacggtggcccctggggcagaggggctgctcaacctgcggccagacgacttcgtcttctacgtcggggggtaccccagtaccttcacgccccctcccctgcttcgcttccccggctaccggggctgcatcgagatggacacgctgaatgaggaggtggtcagcctctacaacttcgagaggaccttccagctggacacggctgtggacaggccttgtgcccgctccaagtcgaccggggacccgtggctcacggacggctcctacctggacggcaccggcttcgcccgcatcagcttcgacagtcagatcagcaccaccaagcgcttcgagcaggagctgcggctcgtgtcctacagcggggtgctcttcttcctgaagcagcagagccagttcctgtgcttggccgtgcaagaaggcagcctcgtgctgttgtatgactttggggctggcctgaaaaaggccgtcccactgcagcccccaccgcccctgacctcggccagcaaggcgatccaggtgttcctgctggggggcagccgcaagcgtgtgctggtgcgtgtggagcgggccacggtgtacagcgtggagcaggacaatgatctggagctggccgacgcctactacctggggggcgtgccgcccgaccagctgcccccgagcctgcgacggctcttccccaccggaggctcagtccgtggctgcgtcaaaggcatcaaggccctgggcaagtatgtggacctcaagcggctgaacacgacaggcgtgagcgccggctgcaccgccgacctgctggtggggcgcgccatgactttccatggccacggcttccttcgcctggcgctctcgaacgtggcaccgctcactggcaacgtctactccggcttcggcttccacagcgcccaggacagtgccctgctctactaccgggcgtccccggatgggctatgccaggtgtccctgcagcagggccgtgtgagcctacagctcctgaggactgaagtgaaaactcaagcgggcttcgccgatggtgccccccattacgtcgccttctacagcaatgccacgggagtctggctgtatgtcgatgaccagctccagcagatgaagccccaccggggaccaccccccgagctccagccgcagcctgaggggcccccgaggctcctcctgggaggcctgcctgagtctggcaccatttacaacttcagtggctgcatcagcaacgtcttcgtgcagcggctcctgggcccacagcgcgtatttgatctgcagcagaacctgggcagcgtcaatgtgagcacgggctgtgcacccgccctgcaagcccagaccccgggcctggggcctagaggactgcaggccaccgcccggaaggcctcccgccgcagccgtcagcccgcccggcatcctgcctgcatgctgcccccacacctcaggaccacccgagactcctaccagtttgggggttccctgtccagtcacctggagtttgtgggcatcctggcccgacataggaactggcccagtctctccatgcacgtcctcccgcgaagctcccgaggcctcctcctcttcactgcccgtctgaggcccggcagcccctccctggcgctcttcctgagcaatggccacttcgttgcacagatggaaggcctcgggactcggctccgcgcccagagccgccagcgctcccggcctggccgctggcacaaggtctccgtgcgctgggagaagaaccggatcctgctggtgacggacggggcccgggcctggagccaggaggggccgcaccggcagcaccagggggcagagcacccccagccccacaccctctttgtgggcggcctcccggccagcagccacagctccaaacttccggtgaccgtcgggttcagcggctgtgtgaagagactgaggctgcacgggaggcccctgggggcccccacacggatggcaggggtcacaccctgcatcttgggccccctggaggcgggcctgttcttcccaggcagcgggggagttatcactttagacctcccaggagctacactgcctgatgtgggcctggaactggaggtgcggcccctggcagtcaccggactgatcttccacttgggccaggcccggacgcccccctacttgcagttgcaggtgaccgagaagcaagtcctgctgcgggcggatgacggagcaggggagttctccacgtcagtgacccgcccctcagtgctgtgtgatggccagtggcaccggctagcggtgatgaaaagcgggaatgtgctccggctggaggtggacgcgcagagcaaccacaccgtgggccccttgctggcggctgcagctggtgccccagcccctctgtacctcgggggcctgcctgagcccatggccgtgcagccctggccccccgcctactgcggctgcatgaggaggctggcggtgaaccggtcccccgtcgccatgactcgctctgtggaggtccacggggcagtgggggccagtggctgcccagccgcctaggacacagccaaccccggcccctggtcaggcccctgcagctgcctcacaccgccccttgtgctcgcctcataggtgtctatttggactctaagctctacgggtgacagatcttgtttctgaagatggtttaagttatagcttcttaaacgaaagaataaaatactgcaaaatgtttttatatttggcccttccacccatttttaattgtgagagatttgtcaccaatcatcactggttcctccttaaaaattaaaaagtaacttctgtgtaa

SEQ ID NO: 154 - DNA, 2166 bp, Homo sapiens
agtacagctccggccgccgcgccgcctggctttcgtattcgttgttctcggcgggctgtggggcctccgcgccgcggccgttagtcatgtcggattctggaagttacggtcagtctgggggtgagcagcaaagttattctacctatggaaatccaggcagccaaggctatggacaagcatcacaaagctattctggctatgggcaaacgactgattcctcttatggacagaactacagcggttactccagttatggacaaagttattcacagtcctatggtggttatgagaatcaaaagcagagctcatatagccagcaaccatataataaccagggacagcagcaaaacatggaatcatcaggaagccaaggtggaagagcaccttcctatgaccagccagactatggtcaacaagattcatatgaccagcagtcaggctatgatcaacatcaaggctcatatgatgagcagtcaaattatgatcagcagcatgattcctatagtcaaaaccagcagtcctatcattcacaaagggaaaactacagccaccacacacaagatgaccgtcgtgatgtgagtaggtatggagaagataatagaggatatggcgggtcacagggaggaggtagagggcgtgggggatatgacaaggatggaagaggtcctatgacaggatcaagtggtggtgaccgcggtggcttcaaaaattttggtggtcacagggattatggacccagaacagatgctgattcagaatctgataattcagataacaacacaatctttgtgcaaggacttggggagggtgtgtctacagatcaagttggggagttctttaaacaaataggaattatcaagacaaataagaagaccggaaaaccaatgataaatctttatacagacaaggacacaggaaagccaaagggggaggcaacagtgtcatttgatgaccctccttcagctaaggcagccattgactggtttgatggaaaagaattccatggcaacatcattaaagtgtcctttgccactagaagacctgaattcatgagaggaggtggaagtggaggtgggcggcgaggccgtggaggatatagaggtcgtggaggctttcaagggagaggtggagaccccaaaagtggggattgggtttgccctaatccgtcatgcggaaatatgaactttgctcgaaggaattcctgcaatcagtgcaatgagcctagaccagaggactctcgtccctcaggaggagatttccgggggagaggctacggtggagagaggggctacagaggtcgtgggggcagaggtggagaccgaggcggctatggtggagacagaagtgggggtggctatggtggagacagaagcagcggtggtggctacagcggagatagaagtgggggcggctatggtggagacagaagtgggggtggctatggtggggacagaggcggcggctatggtggggacagaggaggcggctatggaggagaccgaggaggtggctatggaggagatcgaggtggctatggaggagaccgaggtggaggctatggtggagaccgaggaggctatggaggagatcgaggaggttacggaggagatcgaggaggttatggaggagatcgaggaggctatggaggagacagaagccgggggggctatggaggagaccgtggtggtggcagtggctacggtggagaccgaagtggaggctatggaggagacaggagtggtggcggctatggaggagaccgaggtgggggctacggaggagaccgaggtggctatggaggcaaaatgggaggaagaaacgactacagaaatgatcagcgcaaccgaccatactgatgactgttttgaatgttcctttgtctctgacatgatccatagtgaaattgccagagttttgcctgctgctttcctcgtggcctcttcttgggtagtgaaattaagtgacatttggatttttatttgggtgggagggctgggacagtttttcttctagaaatgtctgttgagatttccccctttagtttccaaccttctccccaacccttggagctaaatgcgttgtaaaatattgccaaaatgaaaagtgttttgtaatactgcaataaaggctgcttgtttttgtggaaaaaaaaaaaaaaaaaaaaaa

SEQ ID NO: 155 - DNA, 10316 bp, Homo sapiens
gagaccagaagcgggcgaattgggcaccggtggcggctgcgggcagtttgaattagactctgggctccagcccgccgaagccgcgccagaactgtactctccgagaggtcgttttcccgtccccgagagcaagtttatttacaaatgttggagtaataaagaaggcagaacaaaatgagctgggctttggaagaatggaaagaagggctgcctacaagagctcttcagaaaattcaagagcttgaaggacagcttgacaaactgaagaaggaaaagcagcaaaggcagtttcagcttgacagtctcgaggctgcgctgcagaagcaaaaacagaaggttgaaaatgaaaaaaccgagggtacaaacctgaaaagggagaatcaaagattgatggaaatatgtgaaagtctggagaaaactaagcagaagatttctcatgaacttcaagtcaaggagtcacaagtgaatttccaggaaggacaactgaattcaggcaaaaaacaaatagaaaaactggaacaggaacttaaaaggtgtaaatctgagcttgaaagaagccaacaagctgcgcagtctgcagatgtctctctgaatccatgcaatacaccacaaaaaatttttacaactccactaacaccaagtcaatattatagtggttccaagtatgaagatctaaaagaaaaatataataaagaggttgaagaacgaaaaagattagaggcagaggttaaagccttgcaggctaaaaaagcaagccagactcttccacaagccaccatgaatcaccgcgacattgcccggcatcaggcttcatcatctgtgttctcatggcagcaagagaagaccccaagtcatctttcatctaattctcaaagaactccaattaggagagatttctctgcatcttacttttctggggaacaagaggtgactccaagtcgatcaactttgcaaatagggaaaagagatgctaatagcagtttctttgacaattctagcagtcctcatcttttggatcaattaaaagcgcagaatcaagagctaagaaacaagattaatgagttggaactacgcctgcaaggacatgaaaaagaaatgaaaggccaagtgaataagtttcaagaactccaactccaactggagaaagcaaaagtggaattaattgaaaaagagaaagttttgaacaaatgtagggatgaactagtgagaacaacagcacaatacgaccaggcgtcaaccaagtatactgcattggaacaaaaactgaaaaaattgacggaagatttgagttgtcagcgacaaaatgcagaaagtgccagatgttctctggaacagaaaattaaggaaaaagaaaaggagtttcaagaggagctctcccgtcaacagcgttctttccaaacactggaccaggagtgcatccagatgaaggccagactcacccaggagttacagcaagccaagaatatgcacaacgtcctgcaggctgaactggataaactcacatcagtaaagcaacagctagaaaacaatttggaagagtttaagcaaaagttgtgcagagctgaacaggcgttccaggcgagtcagatcaaggagaatgagctgaggagaagcatggaggaaatgaagaaggaaaacaacctccttaagagtcactctgagcaaaaggccagagaagtctgccacctggaggcagaactcaagaacatcaaacagtgtttaaatcagagccagaattttgcagaagaaatgaaagcgaagaatacctctcaggaaaccatgttaagagatcttcaagaaaaaataaatcagcaagaaaactccttgactttagaaaaactgaagcttgctgtggctgatctggaaaagcagcgagattgttctcaagaccttttgaagaaaagagaacatcacattgaacaacttaatgataagttaagcaagacagagaaagagtccaaagccttgctgagtgctttagagttaaaaaagaaagaatatgaagaattgaaagaagagaaaactctgttttcttgttggaaaagtgaaaacgaaaaacttttaactcagatggaatcagaaaaggaaaacttgcagagtaaaattaatcacttggaaacttgtctgaagacacagcaaataaaaagtcatgaatacaacgagagagtaagaacgctggagatggacagagaaaacctaagtgtcgagatcagaaaccttcacaacgtgttagacagtaagtcagtggaggtagagacccagaaactagcttatatggagctacagcagaaagctgagttctcagatcagaaacatcagaaggaaatagaaaatatgtgtttgaagacttctcagcttactgggcaagttgaagatctagaacacaagcttcagttactgtcaaatgaaataatggacaaagaccggtgttaccaagacttgcatgccgaatatgagagcctcagggatctgctaaaatccaaagatgcttctctggtgacaaatgaagatcatcagagaagtcttttggcttttgatcagcagcctgccatgcatcattcctttgcaaatataattggagaacaaggaagcatgccttcagagaggagtgaatgtcgtttagaagcagaccaaagtccgaaaaattctgccatcctacaaaatagagttgattcacttgaattttcattagagtctcaaaaacagatgaactcagacctgcaaaagcagtgtgaagagttggtgcaaatcaaaggagaaatagaagaaaatctcatgaaagcagaacagatgcatcaaagttttgtggctgaaacaagtcagcgcattagtaagttacaggaagacacttctgctcaccagaatgttgttgctgaaaccttaagtgcccttgagaacaaggaaaaagagctgcaacttttaaatgataaggtagaaactgagcaggcagagattcaagaattaaaaaagagcaaccatctacttgaagactctctaaaggagctacaacttttatccgaaaccctaagcttggagaagaaagaaatgagttccatcatttctctaaataaaagggaaattgaagagctgacccaagagaatgggactcttaaggaaattaatgcatccttaaatcaagagaagatgaacttaatccagaaaagtgagagttttgcaaactatatagatgaaagggagaaaagcatttcagagttatctgatcagtacaagcaagaaaaacttattttactacaaagatgtgaagaaaccggaaatgcatatgaggatcttagtcaaaaatacaaagcagcacaggaaaagaattctaaattagaatgcttgctaaatgaatgcactagtctttgtgaaaataggaaaaatgagttggaacagctaaaggaagcatttgcaaaggaacaccaagaattcttaacaaaattagcatttgctgaagaaagaaatcagaatctgatgctagagttggagacagtgcagcaagctctgagatctgagatgacagataaccaaaacaattctaagagcgaggctggtggtttaaagcaagaaatcatgactttaaaggaagaacaaaacaaaatgcaaaaggaagttaatgacttattacaagagaatgaacagctgatgaaggtaatgaagactaaacatgaatgtcaaaatctagaatcagaaccaattaggaactctgtgaaagaaagagagagtgagagaaatcaatgtaattttaaacctcagatggatcttgaagttaaagaaatttctctagatagttataatgcgcagttggtgcaattagaagctatgctaagaaataaggaattaaaacttcaggaaagtgagaaggagaaggagtgcctgcagcatgaattacagacaattagaggagatcttgaaaccagcaatttgcaagacatgcagtcacaagaaattagtggccttaaagactgtgaaatagatgcggaagaaaagtatatttcagggcctcatgagttgtcaacaagtcaaaacgacaatgcacaccttcagtgctctctgcaaacaacaatgaacaagctgaatgagctagagaaaatatgtgaaatactgcaggctgaaaagtatgaactcgtaactgagctgaatgattcaaggtcagaatgtatcacagcaactaggaaaatggcagaagaggtagggaaactactaaatgaagttaaaatattaaatgatgacagtggtcttctccatggtgagttagtggaagacataccaggaggtgaatttggtgaacaaccaaatgaacagcaccctgtgtctttggctccattggacgagagtaattcctacgagcacttgacattgtcagacaaagaagttcaaatgcactttgccgaattgcaagagaaattcttatctttacaaagtgaacacaaaattttacatgatcagcactgtcagatgagctctaaaatgtcagagctgcagacctatgttgactcattaaaggccgaaaatttggtcttgtcaacgaatctgagaaactttcaaggtgacttggtgaaggagatgcagctgggcttggaggaggggctcgttccatccctgtcatcctcttgtgtgcctgacagctctagtcttagcagtttgggagactcctccttttacagagctcttttagaacagacaggagatatgtctcttttgagtaatttagaaggggctgtttcagcaaaccagtgcagtgtagatgaagtattttgcagcagtctgcaggaggagaatctgaccaggaaagaaaccccttcggccccagcgaagggtgttgaagagcttgagtccctctgtgaggtgtaccggcagtccctcgagaagctagaagagaaaatggaaagtcaagggattatgaaaaataaggaaattcaagagctcgagcagttattaagttctgaaaggcaagagcttgactgccttaggaagcagtatttgtcagaaaatgaacagtggcaacagaagctgacaagcgtgactctggagatggagtccaagttggcggcagaaaagaaacagacggaacaactgtcacttgagctggaagtagcacgactccagctacaaggtctggacttaagttctcggtctttgcttggcatcgacacagaagatgctattcaaggccgaaatgagagctgtgacatatcaaaagaacatacttcagaaactacagaaagaacaccaaagcatgatgttcatcagatttgtgataaagatgctcagcaggacctcaatctagacattgagaaaataactgagactggtgcagtgaaacccacaggagagtgctctggggaacagtccccagataccaattatgagcctccaggggaagataaaacccagggctcttcagaatgcatttctgaattgtcattttctggtcctaatgctttggtacctatggatttcctggggaatcaggaagatatccataatcttcaactgcgggtaaaagagacatcaaatgagaatttgagattacttcatgtgatagaggaccgtgacagaaaagttgaaagtttgctaaatgaaatgaaagaattagactcaaaactccatttacaggaggtacaactaatgaccaaaattgaagcatgcatagaattggaaaaaatagttggggaacttaagaaagaaaactcagatttaagtgaaaaattggaatatttttcttgtgatcaccaggagttactccagagagtagaaacttctgaaggcctcaattctgatttagaaatgcatgcagataaatcatcacgtgaagatattggagataatgtggccaaggtgaatgacagctggaaggagagatttcttgatgtggaaaatgagctgagtaggatcagatcggagaaagctagcattgagcatgaagccctctacctggaggctgacttagaggtagttcaaacagagaagctatgtttagaaaaagacaatgaaaataagcagaaggttattgtctgccttgaagaagaactctcagtggtcacaagtgagagaaaccagcttcgtggagaattagatactatgtcaaaaaaaaccacggcactggatcagttgtctgaaaaaatgaaggagaaaacacaagagcttgagtctcatcaaagtgagtgtctccattgcattcaggtggcagaggcagaggtgaaggaaaagacggaactccttcagactttgtcctctgatgtgagtgagctgttaaaagacaaaactcatctccaggaaaagctgcagagtttggaaaaggactcacaggcactgtctttgacaaaatgtgagctggaaaaccaaattgcacaactgaataaagagaaagaattgcttgtcaaggaatctgaaagcctgcaggccagactgagtgaatcagattatgaaaagctgaatgtctccaaggccttggaggccgcactggtggagaaaggtgagttcgcattgaggctgagctcaacacaggaggaagtgcatcagctgagaagaggcatcgagaaactgagagttcgcattgaggccgatgaaaagaagcagctgcacatcgcagagaaactgaaagaacgcgagcgggagaatgattcacttaaggataaagttgagaaccttgaaagggaattgcagatgtcagaagaaaaccaggagctagtgattcttgatgccgagaattccaaagcagaagtagagactctaaaaacacaaatagaagagatggccagaagcctgaaagtttttgaattagaccttgtcacgttaaggtctgaaaaagaaaatctgacaaaacaaatacaagaaaaacaaggtcagttgtcagaactagacaagttactctcttcatttaaaagtctgttagaagaaaaggagcaagcagagatacagatcaaagaagaatctaaaactgcagtggagatgcttcagaatcagttaaaggagctaaatgaggcagtagcagccttgtgtggtgaccaagaaattatgaaggccacagaacagagtctagacccaccaatagaggaagagcatcagctgagaaatagcattgaaaagctgagagcccgcctagaagctgatgaaaagaagcagctctgtgtcttacaacaactgaaggaaagtgagcatcatgcagatttacttaagggtagagtggagaaccttgaaagagagctagagatagccaggacaaaccaagagcatgcagctcttgaggcagagaattccaaaggagaggtagagaccctaaaagcaaaaatagaagggatgacccaaagtctgagaggtctggaattagatgttgttactataaggtcagaaaaagaaaatctgacaaatgaattacaaaaagagcaagagcgaatatctgaattagaaataataaattcatcatttgaaaatattttgcaagaaaaagagcaagagaaagtacagatgaaagaaaaatcaagcactgccatggagatgcttcaaacacaattaaaagagctcaatgagagagtggcagccctgcataatgaccaagaagcctgtaaggccaaagagcagaatcttagtagtcaagtagagtgtcttgaacttgagaaggctcagttgctacaaggccttgatgaggccaaaaataattatattgttttgcaatcttcagtgaatggcctcattcaagaagtagaagatggcaagcagaaactggagaagaaggatgaagaaatcagtagactgaaaaatcaaattcaagaccaagagcagcttgtctctaaactgtcccaggtggaaggagagcaccaactttggaaggagcaaaacttagaactgagaaatctgacagtggaattggagcagaagatccaagtgctacaatccaaaaatgcctctttgcaggacacattagaagtgctgcagagttcttacaagaatctagagaatgagcttgaattgacaaaaatggacaaaatgtcctttgttgaaaaagtaaacaaaatgactgcaaaggaaactgagctgcagagggaaatgcatgagatggcacagaaaacagcagagctgcaagaagaactcagtggagagaaaaataggctagctggagagttgcagttactgttggaagaaataaagagcagcaaagatcaattgaaggagctcacactagaaaatagtgaattgaagaagagcctagattgcatgcacaaagaccaggtggaaaaggaagggaaagtgagagaggaaatagctgaatatcagctacggcttcatgaagctgaaaagaaacaccaggctttgcttttggacacaaacaaacagtatgaagtagaaatccagacataccgagagaaattgacttctaaagaagaatgtctcagttcacagaagctggagatagaccttttaaagtctagtaaagaagagctcaataattcattgaaagctactactcagattttggaagaattgaagaaaaccaagatggacaatctaaaatatgtaaatcagttgaagaaggaaaatgaacgtgcccaggggaaaatgaagttgttgatcaaatcctgtaaacagctggaagaggaaaaggagatactgcagaaagaactctctcaacttcaagctgcacaggagaagcagaaaacaggtactgttatggataccaaggtcgatgaattaacaactgagatcaaagaactgaaagaaactcttgaagaaaaaaccaaggaggcagatgaatacttggataagtactgttccttgcttataagccatgaaaagttagagaaagctaaagagatgttagagacacaagtggcccatctgtgttcacagcaatctaaacaagattcccgagggtctcctttgctaggtccagttgttccaggaccatctccaatcccttctgttactgaaaagaggttatcatctggccaaaataaagcttcaggcaagaggcaaagatccagtggaatatgggagaatggtagaggaccaacacctgctaccccagagagcttttctaaaaaaagcaagaaagcagtcatgagtggtattcaccctgcagaagacacggaaggtactgagtttgagccagagggacttccagaagttgtaaagaaagggtttgctgacatcccgacaggaaagactagcccatatatcctgcgaagaacaaccatggcaactcggaccagcccccgcctggctgcacagaagttagcgctatccccactgagtctcggcaaagaaaatcttgcagagtcctccaaaccaacagctggtggcagcagatcacaaaaggtcaaagttgctcagcggagcccagtagattcaggcaccatcctccgagaacccaccacgaaatccgtcccagtcaataatcttcctgagagaagtccgactgacagccccagagagggcctgagggtcaagcgaggccgacttgtccccagccccaaagctggactggagtccaacggcagtgagaactgtaaggtccagtgaaggcactttgtgtgtcagtacccctgggaggtgccagtcattgaatagataaggctgtgcctacaggacttctctttagtcagggcatgctttattagtgaggagaaaacaattccttagaagtcttaaatatattgtactctttagatctcccatgtgtaggtattgaaaaagtttggaagcactgatcacctgttagcattgccattcctctactgcaatgtaaatagtataaagctatgtatataaagctttttggtaatatgttacaattaaaatgacaagcactatatcacaatctctgtttgtatgtgggttttacactaaaaaaatgcaaaacacattttattcttctaattaacagctcctaggaaaatgtagacttttgctttatgatattctatctgtagtatgaggcatggaatagttttgtatcgggaatttctcagagctgagtaaaatgaaggaaaagcatgttatgtgtttttaaggaaaatgtgcacacatatacatgtaggagtgtttatctttctcttacaatctgttttagacatctttgcttatgaaacctgtacatatgtgtgtgtgggtatgtgtttatttccagtgagggctgcaggcttcctagaggtgtgctataccatgcgtctgtcgttgtgcttttttctgtttttagaccaattttttacagttctttggtaagcattgtcgtatctggtgatggattaacatatagcctttgttttctaataaaatagtcgccttcgttttctgtaaaaaaaaaaaaaaaaaaaaaa

SEQ ID NO: 156 - DNA, 4578 bp, Homo sapiens
ctcactgagtccactctgaacgtgctaaaatgggaaggaggcggtgttttgctgatctgttaaattcttagtgaagtttccttgatttccagtggctgctgttgtttgagtttggtttggagcaaaactgaggtagtcctaacatttctgggactgaatccaggcaagagaaagaagaaaaagaagaagaaaaagaggaggaaaaaggtagggagaaataaagggaggagagaagcacagtgaaagaaaaaaaaagtcccttttcgacatcacattcctgtgttttccctcagcctggaaaacatattaatcccagtgcttttacgcccggaaacaaagagactaagccagactatgggggaaagggagataagaaggatcctggaactttaaagagggaaagagtgagattcagaaatcgccaggactggactttaagggacgtcctgtgtcagcacaagggactggcacacacagacacacgagaccgaggagaaactgcagacaaatggagatacaaagacttagaaggacagctcctttcacctcatcctacttgtccagaaggtaaaaagacacagccagaaagaaaaggcatcggctcagctctcagatcaggacaggctgtggatctgtggcggtactctgaaagctggagctgcagcacaccccttttgtattgctcaccctcggtaaagagagagagggctgggaggaaaagtagttcatctaggaaactgtcctgggaaccaaacttctgatttcttttgcaaccctctgcattccatctctatgagccaccattggattacacaatgacatggagaatgggaccccgtttcactatgctgttggccatgtggctagtgtgtggatcagaaccccacccccatgccactattagaggcagccacggaggacggaaagtgcctttggtttctccggacagcagtaggccagctcggtttctgaggcacactgggaggtctcgcggaattgagagatccactctggaggaaccaaaccttcagcctctccagagaaggaggagtgtgcccgtgttgagactagctcgcccaacagagccgccagcccgctcggacatcaatggggccgccgtgagacctgagcaaagaccagcagccaggggctctccgcgtgagatgatcagagatgaggggtcctcagctcggtcaagaatgttgcgtttcccttcggggtccagctctcccaacatccttgccagctttgcagggaagaacagagtatgggtcatctcagcccctcatgcctcggaaggctactaccgcctcatgatgagcctgctgaaggacgatgtgtactgtgagctggcggagaggcacatccaacagattgtgctcttccaccaggcaggtgaggaaggaggcaaggtgagaaggatcaccagcgagggccagatcctggagcagcccctggaccctagcctcatccctaagctgatgagcttcctgaagctggagaagggcaagtttggcatggtgctgctgaagaagacgctgcaggtggaggagcgctatccatatcccgttaggctggaagccatgtacgaggtcatcgaccaaggccccatccgtaggatcgagaagatcaggcagaagggctttgtccagaaatgtaaggcctctggtgtagagggccaggtggtggcggaggggaatgacggtggagggggagcaggaaggccaagcctgggcagcgagaagaagaaagaggacccaaggagagcacaagtcccaccaaccagagagagtcgggtgaaggtcctgagaaaactggccgccactgcaccagctttgccccaacctccctcaacccccagagccaccacccttcctcctgccccagccacaacagtgactcggtccacgtcccgggcggtaacagttgctgcaagacctatgaccaccactgcctttcccaccacgcagaggccctggaccccctcaccctcccacaggccccctacaaccactgaggtgatcactgccaggagaccctcagtttcagagaatctttaccctccatcccggaaggatcagcacagggagaggccacagacaaccaggaggcccagcaaggccaccagcttggagagcttcacaaatgcccctcccaccaccatctcagaacccagcacaagggctgctggcccaggccgtttccgggacaaccgcatggacaggcgggaacatggccaccgagacccaaatgtggtgccaggtcctcccaagccagcaaaggagaaacctcccaaaaagaaggcccaggacaaaattcttagtaatgagtatgaggagaagtatgacctcagccggcctactgcctctcagctggaggacgagctgcaggtggggaatgttccccttaaaaaagcaaaggagtctaaaaagcatgaaaagcttgagaaaccagagaaggagaagaaaaaaaagatgaagaatgagaacgcagacaagttacttaagagtgaaaagcaaatgaagaagtctgagaaaaagagcaagcaagagaaagagaagagcaagaagaaaaaaggaggtaaaacagaacaggatggctatcagaaacccaccaacaaacacttcacgcagagtcccaagaagtcagtggccgacctgctggggtcctttgaaggcaaacgaagactccttctgatcactgctcccaaggctgagaacaatatgtatgtgcaacaacgtgatgaatatctggaaagtttctgcaagatggctaccaggaaaatctctgtgatcaccatcttcggccctgtcaacaacagcaccatgaaaatcgaccactttcagctagataatgagaagcccatgcgagtggtggatgatgaagacttggtagaccagcgtctcatcagcgagctgaggaaagagtacggaatgacctacaatgacttcttcatggtgctaacagatgtggatctgagagtcaagcaatactatgaggtaccaataacaatgaagtctgtgtttgatctgatcgatactttccagtcccgaatcaaagatatggagaagcagaagaaggagggcattgtttgcaaagaggacaaaaagcagtccctggagaacttcctatccaggttccggtggaggaggaggttgctggtgatctctgctcctaacgatgaagactgggcctattcacagcagctctctgccctcagtggtcaggcgtgcaattttggtctgcgccacataaccattctgaagcttttaggcgttggagaggaagttgggggagtgttagaactgttcccaattaatgggagctctgttgttgagcgagaagacgtaccagcccatttggtgaaagacattcgtaactattttcaagtgagcccggagtacttctccatgcttctagtcggaaaagacggaaatgtcaaatcctggtatccttccccaatgtggtccatggtgattgtgtacgatttaattgattcgatgcaacttcggagacaggaaatggcgattcagcagtcactggggatgcgctgcccagaagatgagtatgcaggctatggttaccatagttaccaccaaggataccaggatggttaccaggatgactaccgtcatcatgagagttatcaccatggatacccttactgagcagaaatatgtaaccttagactcagccagtttcctctgcagctgctaaaactacatgtggccagctccattcttccacactgcgtactacatttcctgcctttttctttcagtgtttttctaagactaaataaatagcaaactttcacctattcatgagttattattgaaacctcaaatcataaagacatttaaaagaattgtttttctaactggaggggctctagtgctaaataatagtactgaaaattgatattattttccttttcttatatgaaggaccttatttggcatataaaattttataaaatatgtatttaaagctttttcttattttttgtattaattggtaagtgaaaactctgttaaagatcacaccacaatgttttcaagaaacatctgaaaagataaaacaaagaacaaataacttataatacttacttaaattgacactttttgaaatgccagtctgaaaataattaagatatctctgctttgtatgagtttcttttatgaaacttgataccacgggagtccagtaatattggccacaaaagccagagaaagtaccaagcccagctttgttatcatagccacttcctgccctgcttctgttatttttagtgttttttcagatataaatcggggtccaggaaatcctcaccagaatctggcactgcagccaaaggcgatacttccagagttctagtaggctgctatggaatttctggcatgaaaattcttgacccctcacactttaccccctgtacagcacaggcataccatggagatattacaggatcagttccagaccaccataataaagtggatatcgcaataaagtgagtcacacaaaaaaaaaaaaaaaaaaaaaaaaaaaaaaaaaaaaaaaaaaaaaaaaaaaaaaaaa

SEQ ID NO: 157 - DNA, 8972 bp, Homo sapiens
cagctgccacttttcaccgttagaagtagagctttttccagacctcctaccttttagtctactttgaaaggtgaaagaaagaacatcgtttcaggaataaaaatgcacagtagtagttatagttaccgtagcagtgattctgtgtttagtaacactaccagcactcgaaccagtcttgattcaaatgaaaatcttctcttggttcattgtggtccaacactgatcaactcttgcattagcttcggcagtgaatcctttgatggacacaggttagaaatgttgcaacagattgccaacagagttcagagggacagtgtcatctgtgaagacaaactgattcttgctggaaatgctcttcagtctgattctaaaagattagaatcaggagtgcagtttcagaatgaagcagaaattgctgggtatatacttgaatgtgagaaccttttacgccagcatgtaattgatgtacagattcttattgatggaaaatactaccaggcagatcaattggtacagagggttgcaaaactgcgtgacgaaattatggccttaaggaacgaatgttcttctgtgtacagcaaaggacgcatactgacaacagaacagacaaagctcatgatatcaggaatcactcaaagtttaaactcaggatttgcacagaccttacaccctagtctgacctcagggctgacccagagtttaacaccttccctaacctcttctagtatgacttctggcctgtcatcagggatgacttcccgcctgactccatctgtcactccagcttatacacctggtttcccatcaggattagttccaaatttcagttcaggagtagagccaaattcattgcaaactttgaagttgatgcagatccgaaaaccccttctaaagtcttctttgctggatcaaaatttaacagaagaagaaatcaatatgaaatttgttcaggatcttttgaattgggttgatgagatgcaggtacaactggaccgcactgagtggggctcagatttgccaagtgttgaaagccatttagaaaatcataaaaatgttcatagagctattgaagaatttgaatctagtctcaaagaagctaaaatcagtgagattcaaatgacagcacctcttaaactgacttatgcagaaaagttgcacagattagagagtcagtatgcaaaactcttgaatacatccaggaatcaagaacggcaccttgatacactccataattttgtaagtcgtgcgactaatgaacttatttggttgaatgaaaaagaagaggaggaagttgcttatgactggagtgagagaaacaccaacatagctaggaaaaaagattatcatgctgaattaatgagagaacttgatcaaaaggaagaaaatattaaatcagttcaggagatagcagagcagctacttctagaaaatcatccagcccggttaactattgaggcctacagagcggcaatgcagacgcagtggagctggatcttacagctctgccagtgtgtggagcagcacataaaggagaacacagcgtatttcgagtttttcaatgatgccaaagaagctactgattacttaaggaatctaaaagatgccattcagcggaagtacagctgtgatagatcaagcagcattcacaagctagaagaccttgttcaggaatcaatggaagagaaagaagaacttctgcagtacaaaagcactatagcaaacctaatgggaaaagcaaaaacaataattcaactgaagccaaggaattctgactgtccactcaaaacttctattccgatcaaagctatctgtgactacagacaaattgagataaccatttacaaagacgatgaatgtgttttggcgaataactctcatcgtgctaaatggaaggtcattagtcctactgggaatgaggctatggtcccatctgtgtgcttcaccgttcctccaccaaacaaagaagcggtggaccttgccaacagaattgagcaacagtatcagaatgtcctgactctttggcatgagtctcacataaacatgaagagtgtagtatcctggcattatctcatcaatgaaattgatagaattcgagctagcaatgtggcttcaataaagacaatgctacctggtgaacatcagcaagttctaagtaatctacaatctcgttttgaagattttctggaagatagccaggaatcccaagtcttttcaggctcagatataacacaactggaaaaggaggttaatgtatgtaagcagtattatcaagaacttcttaaatctgcagaaagagaggagcaagaggaatcagtttataatctctacatctctgaagttcgaaacattagacttcggttagagaactgtgaagatcggctgattagacagattcgaactcccctggaaagagatgatttgcatgaaagtgtgttcagaatcacagaacaggagaaactaaagaaagagctggaacgacttaaagatgatttgggaacaatcacaaataagtgtgaggagtttttcagtcaagcagcagcctcttcatcagtccctaccctacgatcagagcttaatgtggtccttcagaacatgaaccaagtctattctatgtcttccacttacatagataagttgaaaactgttaacttggtgttaaaaaacactcaagctgcagaagccctcgtaaaactctatgaaactaaactgtgtgaagaagaagcagttatagctgacaagaataatattgagaatctaataagtactttaaagcaatggagatctgaagtagatgaaaagagacaggtattccatgccttagaggatgagttgcagaaagctaaagccatcagtgatgaaatgtttaaaacgtataaagaacgggaccttgattttgactggcacaaagaaaaagcagatcaattagttgaaaggtggcaaaatgttcatgtgcagattgacaacaggttacgggacttagagggcattggcaaatcactgaagtactacagagacacttaccatcctttagatgattggatccagcaggttgaaactactcagagaaagattcaggaaaatcagcctgaaaatagtaaaaccctagccacacagttgaatcaacagaagatgctggtgtccgaaatagaaatgaaacagagcaaaatggacgagtgtcaaaaatatgcagaacagtactcagctacagtgaaggactatgaattacaaacaatgacctaccgggccatggtagattcacaacaaaaatctccagtgaaacgccgaagaatgcagagttcagcagatctcattattcaagagttcatggacctaaggactcgatatactgccctggtcactctcatgacacaatatattaaatttgctggtgattcattgaagaggctggaagaggaggagattaaaaggtgtaaggagacttctgaacatggggcatattcagatctgcttcagcgtcagaaggcaacagtgcttgagaatagcaaacttacaggaaagataagtgagttggaaagaatggtagctgaactaaagaaacaaaagtcccgagtagaggaagaacttccgaaggtcagggaggctgcagaaaatgaattgagaaagcagcagagaaatgtagaagatatctctctgcagaagataagggctgaaagtgaagccaagcagtaccgcagggaacttgaaaccattgtgagagagaaggaagccgctgaaagagaactggagcgggtgaggcagctcaccatagaggccgaggctaaaagagctgccgtggaagagaacctcctgaattttcgcaatcagttggaggaaaacacctttaccagacgaacactggaagatcatcttaaaagaaaagatttaagtctcaatgatttggagcaacaaaaaaataaattaatggaagaattaagaagaaagagagacaatgaggaagaactcttgaagctgataaagcagatggaaaaagaccttgcatttcagaaacaggtagcagagaaacagttgaaagaaaagcagaaaattgaattggaagcaagaagaaaaataactgaaattcagtatacatgtagagaaaatgcattgccagtgtgtccgatcacacaggctacatcatgcagggcagtaacgggtctccagcaagaacatgacaagcagaaagcagaagaactcaaacagcaggtagatgaactaacagctgccaatagaaaggctgaacaagacatgagagagctgacatatgaacttaatgccctccagcttgaaaaaacgtcatctgaggaaaaggctcgtttgctaaaagataaactagatgaaacaaataatacactcagatgccttaagttggagctggaaaggaaggatcaggcggagaaagggtattctcaacaactcagagagcttggtaggcaattgaatcaaaccacaggtaaagctgaagaagccatgcaagaagctagtgatctcaagaaaataaagcgcaattatcagttagaattagaatctcttaatcatgaaaaagggaaactacaaagagaagtagacagaatcacaagggcacatgctgtagctgagaagaatattcagcatttaaattcacaaattcattcttttcgagatgagaaagaattagaaagactacaaatctgccagagaaaatcagatcatctaaaagaacaatttgagaaaagccatgagcagttgcttcaaaatatcaaagctgaaaaagaaaataatgataaaatccaaaggctcaatgaagaattggagaaaagtaatgagtgtgcagagatgctaaaacaaaaagtagaggagcttactaggcagaataatgaaaccaaattaatgatgcagagaattcaggcagaatcagagaatatagttttagagaaacaaactatccagcaaagatgtgaagcactgaaaattcaggcagatggttttaaagatcagctacgcagcacaaatgaacacttgcataaacagacaaaaacagagcaggattttcaaagaaaaattaaatgcctagaagaagacctggcgaaaagtcaaaatttggtaagtgaatttaagcaaaagtgtgaccaacagaacattatcatccagaataccaagaaagaagttagaaatctgaatgcggaactgaatgcttccaaagaagagaagcgacgcggggagcagaaagttcagctacaacaagctcaggtgcaagagttaaataacaggttgaaaaaagtacaagacgaattacacttaaagaccatagaggagcagatgacccacagaaagatggttctgtttcaggaagaatctggtaaattcaaacaatcagcagaggagtttcggaagaagatggaaaaattaatggagtccaaagtcatcactgaaaatgatatttcaggcattaggcttgactttgtgtctcttcaacaagaaaactctagagcccaagaaaatgctaagctttgtgaaacaaacattaaagaacttgaaagacagcttcaacagtatcgtgaacaaatgcagcaagggcagcacatggaagcaaatcattaccaaaaatgtcagaaacttgaggatgagctgatagcccagaagcgtgaggttgaaaacctgaagcaaaaaatggaccaacagatcaaagagcatgaacatcaattagttttgctccagtgtgaaattcaaaaaaagagcacagccaaagactgtaccttcaaaccagattttgagatgacagtgaaggagtgccagcactctggagagctgtcctctagaaacactggacaccttcacccaacacccagatcccctctgttgagatggactcaagaaccacagccattggaagagaagtggcagcatcgggttgttgaacagatacccaaagaagtccaattccagccaccaggggctccactcgagaaagagaaaagccagcagtgttactctgagtacttttctcagacaagcaccgagttacagataacttttgatgagacaaaccccattacaagactgtctgaaattgagaagataagagaccaagccctgaacaattctagaccacctgttaggtatcaagataacgcatgtgaaatggaactggtgaaggttttgacacccttagagatagctaagaacaagcagtatgatatgcatacagaagtcacaacattaaaacaagaaaagaacccagttcccagtgctgaagaatggatgcttgaagggtgcagagcatctggtggactcaagaaaggggatttccttaagaagggcttagaaccagagaccttccagaactttgatggtgatcatgcatgttcagtcagggatgatgaatttaaattccaagggcttaggcacactgtgactgccaggcagttggtggaagctaagcttctggacatgagaacaattgagcagctgcgactcggtcttaagactgttgaagaagttcagaaaactcttaacaagtttctgacgaaagccacctcaattgcagggctttacctagaatctacaaaagaaaagatttcatttgcctcagcggccgagagaatcataatagacaaaatggtggctttggcatttttagaagctcaggctgcaacaggttttataattgatcccatttcaggtcagacatattctgttgaagatgcagttcttaaaggagttgttgaccccgaattcagaattaggcttcttgaggcagagaaggcagctgtgggatattcttattcttctaagacattgtcagtgtttcaagctatggaaaatagaatgcttgacagacaaaaaggtaaacatatcttggaagcccagattgccagtgggggtgtcattgaccctgtgagaggcattcgtgttcctccagaaattgctctgcagcaggggttgttgaataatgccatcttacagtttttacatgagccatccagcaacacaagagttttccctaatcccaataacaagcaagctctgtattactcagaattactgcgaatgtgtgtatttgatgtagagtcccaatgctttctgtttccatttggggagaggaacatttccaatctcaatgtcaagaaaacacatagaatttctgtagtagatactaaaacaggatcagaattgaccgtgtatgaggctttccagagaaacctgattgagaaaagtatatatcttgaactttcagggcagcaatatcagtggaaggaagctatgttttttgaatcctatgggcattcttctcatatgctgactgatactaaaacaggattacacttcaatattaatgaggctatagagcagggaacaattgacaaagccttggtcaaaaagtatcaggaaggcctcatcacacttacagaacttgctgattctttgctgagccggttagtccccaagaaagatttgcacagtcctgttgcagggtattggctgactgctagtggggaaaggatctctgtactaaaagcctcccgtagaaatttggttgatcggattactgccctccgatgccttgaagcccaagtcagtacagggggcataattgatcctcttactggcaaaaagtaccgggtggccgaagctttgcatagaggcctggttgatgaggggtttgcccagcagctgcgacagtgtgaattagtaatcacagggattggccatcccatcactaacaaaatgatgtcagtggtggaagctgtgaatgcaaatattataaataaggaaatgggaatccgatgtttggaatttcagtacttgacaggagggttgatagagccacaggttcactctcggttatcaatagaagaggctctccaagtaggtattatagatgtcctcattgccacaaaactcaaagatcaaaagtcatatgtcagaaatataatatgccctcagacaaaaagaaagttgacatataaagaagccttagaaaaagctgattttgatttccacacaggacttaaactgttagaagtatctgagcccctgatgacaggaatttctagcctctactattcttcctaatgggacatgtttaaataactgtgcaaggggtgatgcaggctggttcatgccactttttcagagtatgatgatatcggctacatatgcagtctgtgaattatgtaacatactctatttcttgagggctgcaaattgctaagtgctcaaaatagagtaagttttaaattgaaaattacataagatttaatgcccttcaaatggtttcatttagccttgagaatggttttttgaaacttggccacactaaaatgtttttttttttacgtagaatgtgggataaacttgatgaactccaagttcacagtgtcatttcttcagaactccccttcattgaatagtgatcatttattaaatgataaattgcactcgctgaaagagcacgtcatgaagcaccatggaatcaaagagaaagatataaattcgttcccacagccttcaagctgcagtgttttagattgcttcaaaaaatgaaaaagttttgcctttttctgtatatagtgaccttctttgcatattaaaatgtttaccacaatgtcccatttctagttaagtcttcgcacttgaaagctaacattatgaatattatgtgttggaggaggggaaggattttcttcattctgtgtattttccttacatgtacagtagacgttctctattctatcagccttctatggtacctttttgtcaggacaattaggattgtaatgctaatgcaaaggcagcaattcaaagatcttctagtgcctcatgaataaagttgagatttaaaatttgtaacattgatggaacagctgggaggttagaccaatcattaaggaatgtatgccatagctttctttgctaccataaacattttggaggtgcatctgctatgtgacatggtaaatatggttaagtgaatgaataaaatgttttagtaa

SEQ ID NO: 158 - DNA, 3009 bp, Homo sapiens
gcgcaggcgcggcggccgatgcgagtgtgtatgtgcgggcgagaagatggcggcggcgggggaagcagcgtgagcagccggaggatcgcggagtcccaatgaaacgggcagccatggccctccacagcccgcagtatatttttggagattttagccctgatgaattcaatcaattctttgtgactcctcgatcttcagttgagcttcctccatacagtggaacagttctgtgtggcacacaggctgtggataaactacctgatggacaagaatatcagagaattgagtttggtgtcgatgaagtcattgaacccagtgacactttgccgagaacccccagctacagtatttcaagcacactgaaccctcaggcccctgaatttattctcggttgtacagcttccaaaataacccctgatggtatcactaaagaagcaagctatggctccatcgactgccagtacccaggctctgccctcgctttggatggaagttctaatgtggaggcggaagttttggaaaatgatggtgtctcaggtggtcttggacaaagggagcgtaaaaagaagaaaaagcggccacctggatattacagctatttgaaagatggtggcgatgatagtatctccacagaagccctggtcaatggccatgccaattcagcagtcccgaacagtgtcagtgcagaggatgcagaatttatgggtgacatgcctccgccacttacgcccaggacttgtaacagcccccagaactccacagactctgtcagtgacattgtgcctgacagtcctttccccggagcactcggcagtgacaccaggactgcagggcagccagaggggggccccggggctgattttggtcagtcctgcttccctgcagaggctggcagagacaccctgtcaaggacagctggggctcagccctgcgttggtaccgatactactgaaaaccttggagttgctaatggacaaatacttgaatcctcgggtgagggcacagctaccaacggggtggagttgcacaccacggaaagcatagacttggacccaaccaaacccgagagtgcatcacctcctgctgacggcacgggctctgcatcaggcacccttcctgtcagccagcccaagtcctgggccagcctctttcatgattctaagccctcttcctcctcgccggtggcctatgtggaaactaagtattcccctcccgccatatctcccctggtttctgaaaagcaggttgaagtcaaagaagggcttgttccggtttcagaggatcctgtagccataaagattgcagagttgctggagaatgtaaccctaatccataaaccagtgtcgttgcaaccccgtgggctgatcaataaagggaactggtgctacattaatgctacactgcaggcattggttgcttgcccgccgatgtaccacctgatgaagttcattcctctgtattccaaagtgcaaaggccttgtacgtcaacacccatgatagacagctttgttcggctaatgaatgagttcactaatatgccagtacctccaaaaccccgacaagctcttggagataaaatcgtgagggatattcgccctggagctgcctttgagcccacatatatttacagactcctgacagttaacaagtcaagcctgtctgaaaagggtcgacaagaagatgctgaggaatacttaggcttcattctaaatggacttcatgaggaaatgttgaacctaaagaagcttctctcaccaagtaatgaaaaacttacgatttccaacggccccaaaaaccactcggtcaatgaagaagagcaggaagaacaaggtgaaggaagcgaggatgaatgggaacaagtgggcccccggaacaagacttccgtcacccgccaggcggattttgttcagactccaatcaccggcatttttggtggacacatcaggtctgtggtttaccagcagagttcaaaagaatctgccactttgcagccatttttcacgttgcagttggatatccagtcagacaagatacgcacagtccaggatgcactggagagcttggtggcaagagaatctgtccaaggttataccacaaaaaccaaacaagaggttgagataagtcgaagagtgactctggaaaaactccctcctgtcctcgtgctgcacctgaaacgattcgtttatgagaagactggtgggtgccagaagcttatcaaaaatattgaatatcctgtggacttggaaattagtaaagaactgctttctccaggggttaaaaataagaattttaaatgccaccgaacctatcggctctttgcagtggtctaccatcacggcaacagtgcgacgggcggccattacactacagacgtcttccagatcggtctgaatggctggctgcgcatcgatgaccagacagtcaaggtgatcaaccagtaccaggtggtgaaaccaactgctgaacgcacagcctacctcctgtattaccgccgagtggacctgctgtaaaccctgtgtgcgctgtgtgtgcgcccagtgcccgcttcgtaggacaccacctcacactcacttcccgcctctctttagtggctctttagagagaaactctttctccctttgcaaaaatgggctagaatgaaaaggagatgccttggggttcgtgcacaacacagcttctgttgactctaacttccaaatcaaaatcatttggttgaaacagactgttgcttgattttagaaaatacacaaaaacccatatttctgaaataatgctgattcctgagataagaaagtggatttgatccccagtctcattgcttagtagaataaatcctgcaccagcaacaacacttgtaaatttgtgaaaatgaattttatctttccttaaaaaagaaattttttaatccatcacacttttcttccctaccctttagtttttgataaatgataaaaatgagccagttatcaaagaagaactagttcttacttcaaaaaaaaaaaaaaaaaa

SEQ ID NO: 159 - DNA, 2253 bp, Homo sapiens
ctctccagaggcgggccctgagccggcacctcccctttcggacagctcaagggactcagccaactggctcacgcctccccttcagcttctcttcacgcactccaagatctaaaccgagaatcgaaactaagctggggtccatggagcctgcacccgcccgatctccgaggccccagcaggaccccgcccggccccaggagcccaccatgcctccccccgagaccccctctgaaggccgccagcccagccccagccccagccctacagagcgagcccccgcttcggaggaggagttccagtttctgcgctgccagcaatgccaggcggaagccaagtgcccgaagctgctgccttgtctgcacacgctgtgctcaggatgcctggaggcgtcgggcatgcagtgccccatctgccaggcgccctggcccctaggtgcagacacacccgccctggataacgtctttttcgagagtctgcagcggcgcctgtcggtgtaccggcagattgtggatgcgcaggctgtgtgcacccgctgcaaagagtcggccgacttctggtgctttgagtgcgagcagctcctctgcgccaagtgcttcgaggcacaccagtggttcctcaagcacgaggcccggcccctagcagagctgcgcaaccagtcggtgcgtgagttcctggacggcacccgcaagaccaacaacatcttctgctccaaccccaaccaccgcacccctacgctgaccagcatctactgccgaggatgttccaagccgctgtgctgctcgtgcgcgctccttgacagcagccacagtgagctcaagtgcgacatcagcgcagagatccagcagcgacaggaggagctggacgccatgacgcaggcgctgcaggagcaggatagtgcctttggcgcggttcacgcgcagatgcacgcggccgtcggccagctgggccgcgcgcgtgccgagaccgaggagctgatccgcgagcgcgtgcgccaggtggtagctcacgtgcgggctcaggagcgcgagctgctggaggctgtggacgcgcggtaccagcgcgactacgaggagatggccagtcggctgggccgcctggatgctgtgctgcagcgcatccgcacgggcagcgcgctggtgcagaggatgaagtgctacgcctcggaccaggaggtgctggacatgcacggtttcctgcgccaggcgctctgccgcctgcgccaggaggagccccagagcctgcaagctgccgtgcgcaccgatggcttcgacgagttcaaggtgcgcctgcaggacctcagctcttgcatcacccaggggaaagatgcagctgtatccaagaaagccagcccagaggctgccagcactcccagggaccctattgacgttgacctgcccgaggaggcagagagagtgaaggcccaggttcaggccctggggctggctgaagcccagcctatggctgtggtacagtcagtgcccggggcacaccccgtgccagtgtacgccttctccatcaaaggcccttcctatggagaggatgtctccaatacaacgacagcccagaagaggaagtgcagccagacccagtgccccaggaaggtcatcaagatggagtctgaggaggggaaggaggcaaggttggctcggagctccccggagcagcccaggcccagcacctccaaggcagtctcaccaccccacctggatggaccgcctagccccaggagccccgtcataggaagtgaggtcttcctgcccaacagcaaccacgtggccagtggcgccggggaggcagaggaacgcgttgtggtgatcagcagctcggaagactcagatgccgaaaactcgtcctcccgagagctggatgacagcagcagtgagtccagtgacctccagctggaaggccccagcaccctcagggtcctggacgagaaccttgctgacccccaagcagaagacagacctctggttttctttgacctcaagattgacaatgaaagtgggttctcctggggctacccccacccctttctaatttagtctctgagtcccaaaaagaagtgcaggcagagccatctgccaggcccaggagagctctgagctctggccaacaactgcagccaggctgggcagagcactccggctcacctgggctcctggcgtgtcatttgctggcttgaataaagatgtccgccttatccagtgcctgagtgtgcggagaggcagatgcctccaaaaaaaaaaaaaaaaa

SEQ ID NO: 160 - DNA, 5330 bp, Homo sapiens
cagcgcgcggcaggcggcgagctcgggggccgcagaaaatgaaactgaagccgtggtcacgtgacaggacatgtagtatatagcaggctgccagcgactcctgctcttgcttctggatctgcagggcagtcccagcaggacccatggagtgtccttcgtgccagcatgtctccaaggaggaaacccccaagttctgcagccagtgcggagagaggctgcctcctgcagcccccatagcagattctgagaacaataactccacaatggcgtcggcctcggagggtgaaatggagtgtgggcaggagctgaaggaggaagggggcccgtgcttgttcccgggctcagacagttggcaagaaaaccccgaggagccctgttccaaagcctcctggaccgtccaagaaagcaaaaagaagaaaaggaagaagaaaaagaaggggaacaagtccgcttcctcagagctggcttccttgcccctttctcctgccagcccctgtcacctgactttgctttcaaacccgtggcctcaggacacagccctgccccacagccaagcccagcagagtggccccactggccagccgagccagcccccaggcacagccaccacgccactggagggtgacggcctctccgcgcccaccgaggttggcgacagccccctgcaggcccaggctttgggagaggcaggagtggccacaggaagtgaggctcagagcagcccgcaattccaggaccacacggaaggggaggaccaggacgcttccatcccctctgggggcagaggcctgtcccaggaggggaccggtccccccacctctgctggtgaaggccattctaggactgaagatgctgcccaggagctcctgttgcctgagtcaaaaggaggcagctctgagcccgggacagaactgcagaccaccgagcaacaggcaggggcctcagcctctatggcagttgatgctgtagctgagccagccaatgcagttaaaggggccgggaaggaaatgaaagagaagacccagagaatgaaacagccaccagcaaccactcctcctttcaaaacacactgccaggaagctgagaccaagaccaaggacgagatggctgctgctgaagaaaaagtcggtaagaatgaacaaggggagcctgaagacctcaagaagccagaggggaagaacagaagtgcagctgctgtgaaaaacgagaaggagcaaaaaaaccaggaagcagatgtccaggaagtgaaggcaagcacgctgagcccgggtggaggagtcaccgtgttcttccacgccatcatctctcttcatttcccattcaatcctgacctccataaagtcttcatcagaggaggagaagaatttggggagtcaaaatgggacagcaatatctgtgagctgcactacaccagagacttgggtcatgaccgcgttcttgttgaaggcattgtctgcatttccaagaagcacctagataaatacattccttacaagtacgtcatttataatggggaatcttttgagtatgagttcatttacaagcaccagcagaagaagggcgagtacgtcaaccgctgtctgttcataaaatcttcacttctgggctcaggagactggcatcagtactatgacatagtttatatgaagcctcatgggagactccagaaagtcatgaaccacatcacagacgggccgaggaaggacctggtgaaggggaagcagattgccgctgcgctcatgctggacagcaccttcagcatcctgcagacctgggacaccatcaacctgaacagcttcttcacccagttcgagcagttttgctttgtcctgcaacagcctatgatttatgaaggacaggcacagctgtggaccgatttgcagtacagggagaaagaggtgaagagatacctgtggcaacatctgaaaaaacacgtggtaccattgccggacggaaaaagcacggactttttgcctgtggactgcccagtgaggagtaaactgaaaacaggcctgattgtcctttttgtagtggaaaaaattgagcttttattagaaggcagcctggactggttgtgtcacctcctaacctcagatgccagctcaccagatgagtttcaccgtgacctaagccacatccttgggatacctcagagctggcggctgtacctggtgaacctgtgccaaagatgcatggacacaaggacgtacacctggctgggcgccctgcctgtcctgcactgctgtatggagctggccccgcggcacaaggatgcctggagacagcctgaggacacctgggccgctctggagggactctccttctcaccgttccgggaacaaatgctagatacgagttccctacttcagtttatgagagagaagcagcatttgctgagcatagacgagcctctcttccggtcctggtttagtctgctacctctgagtcacctggttatgtatatggaaaacttcattgagcacctgggtcgttttcctgctcatatcctggactgtctttcagggatttactaccggcttccgggacttgagcaagtcttgaatacgcaggatgttcaggatgttcagaacgttcagaacattttagaaatgctgttgcgactcctggacacttaccgggacaagattcccgaggaggccttgtcaccatcctacctgactgtgtgtctgaaactgcatgaagccatctgcagcagcacaaagctacttaagttttacgagctgccagccttatctgccgagattgtctgcagaatgattagacttctatctctggtggattctgcaggacagagagatgaaactggaaataattcagtccaaacagtcttccaagggacccttgctgctacgaaaaggtggctccgagaagtttttacaaagaacatgctcacatcttcaggtgcctcattcacatacgtcaaggaaattgaggtctggaggcggctggtggaaatccaattccccgcggagcatggctggaaggagtcgttgctgggagacatggaatggaggctcacaaaggaggaacccctctcccagatcactgcctactgcaatagttgctgggacaccaaaggcttagaggacagtgtggccaagaccttcgagaaatgcatcattgaagccgtgagctcagcctgccaggtgaacaatctctcctcctgggaaacggattcgggctcacagctgtgttctgccatgacccagctaagggctatgaagcacccgctgggtctcagctcctccgctaactcagagattgggaagtgggcaccctcctccctcgccaagggcaatggcgctgaaatctagttctctccggattcctcagtgtgctgcacagtccctgctgctcgcaccatcctgcatgtgttccatatggaatcacggccgtgcgcgtgtggcacaagtcacacgggcttgcaggccgttcctcagatggccctgtcatcactgtggctgctggtttgattgattgttaacacttgctcagtaggtgtgcgggaagagactccaaaggttgacagaacatttatggaagcaaaatatgtgaaatggaaaattgtatcaatttatttagctcttttcggcaaaggggaagagattgtgcccccctgtctcccaggaacagtctcgcaggcaatgccacatgaggaagctccctgctggccacggctgccctgctcacatttcctaattggacacttaacccctgtacaagcacagccttgcggccacaggggaagtccagaaacattgaggtcattgaattccggggaccaaggggttctaattttttaagtgactgatacctttgataaggttttcctttccctttttcgttaactctttgttgagatattgttcgtatgccatacggtacatctgtcaaaagttccagttcagcaggttttggggtagtcacagatatgtacagtcatcaccacagttaatgacagagcattttcatcacttcaaagagaaacccggcccctttagccatcatcctcctcccctctagtcacccactcccctctgcaggcataaacaattgctgaacataaacaactgcttctgtggctttctctgttctgactgtcatatgaatggaatcatatcatatgtggccttttgggtatggcttatttcactgagcataatgtttttttgttgttggtggtggtggttgtttgttgtttttgagacagagtttcactctttttgcccaggctggagtgcaatggtgcgatcctggctcaccgcaaccgctgcctcccgggttcaagtgattctcctgcctcagcctcccaagtgctggaattacagctactttttgtttaaagagtcttttaattgtttaaagaacaatgtgccgccacactcggttccttttgtatttttagaagagacagggtttctccatgttggtcaggctggtctcgaactcccgacctcaggtgatccacccaccttggcctcccgaagtgccgagattacaggtgtgagccaccgcgcccggccgagcataatgttttgaaagaccgctcaggctggacacggttgctcacgcctgtaatcacggcactttgggagcccaggagttcaagacaagcctgggtaacagagtaagaccctgtctctataaaaactaaaaaataaacaaaaaaaattagccaggcatggccgggcacacctgtggtcccagctacttgggaggctgaggtgggaggctcccttgggcccagaaggtcaaggcagcagtgagccatgatcacaccactgcacttcaacctgggggacagagcaagaccctgtctcaaaaagcaataacaacaaaagtccatccatattgtagcttgtgtccgtttacgttaagtattccttacccaaaatgcttgagaccagaagtgttttggatttcagatgttttcaaattttggaatatttgcatttacataatgagatgtcttccagatgggacccagagtctaaccacaaaattcacttgtttcatatacatcttatacacatagcctgaaggtaattttatacaatatttttaacaattttgtgcatgagacaaagtttgtattaagtatttgtatgttgaatttttcacttgtggcatcattatactcaaaaagtttggattttgtagtattttggatttggggattaggaatgctcaacctatatttcatttttttccatggccaaatattccccgtttatccatgtgtccattgacggccatctatgttgcttcttcggctattataaatctgctgatacaaaaaaaaaaaaaaa

SEQ ID NO: 161 - DNA, 5748 bp, Homo sapiens
gagaagaaagccagtgcgtctctgggcgcaggggccagtggggctcggaggcacaggcaccccgcgacactccaggttccccgacccacgtccctggcagccccgattatttacagcctcagcagagcacggggcgggggcagaggggcccgcccgggagggctgctacttcttaaaacctctgcgggctgcttagtcacagccccccttgcttgggtgtgtccttcgctcgctccctccctccgtcttaggtcactgttttcaacctcgaataaaaactgcagccaacttccgaggcagcctcattgcccagcggaccccagcctctgccaggttcggtccgccatcctcgtcccgtcctccgccggcccctgccccgcgcccagggatcctccagctcctttcgcccgcgccctccgttcgctccggacaccatggacaagttttggtggcacgcagcctggggactctgcctcgtgccgctgagcctggcgcagatcgatttgaatataacctgccgctttgcaggtgtattccacgtggagaaaaatggtcgctacagcatctctcggacggaggccgctgacctctgcaaggctttcaatagcaccttgcccacaatggcccagatggagaaagctctgagcatcggatttgagacctgcaggtatgggttcatagaagggcacgtggtgattccccggatccaccccaactccatctgtgcagcaaacaacacaggggtgtacatcctcacatccaacacctcccagtatgacacatattgcttcaatgcttcagctccacctgaagaagattgtacatcagtcacagacctgcccaatgcctttgatggaccaattaccataactattgttaaccgtgatggcacccgctatgtccagaaaggagaatacagaacgaatcctgaagacatctaccccagcaaccctactgatgatgacgtgagcagcggctcctccagtgaaaggagcagcacttcaggaggttacatcttttacaccttttctactgtacaccccatcccagacgaagacagtccctggatcaccgacagcacagacagaatccctgctaccactttgatgagcactagtgctacagcaactgagacagcaaccaagaggcaagaaacctgggattggttttcatggttgtttctaccatcagagtcaaagaatcatcttcacacaacaacacaaatggctggtacgtcttcaaataccatctcagcaggctgggagccaaatgaagaaaatgaagatgaaagagacagacacctcagtttttctggatcaggcattgatgatgatgaagattttatctccagcaccatttcaaccacaccacgggcttttgaccacacaaaacagaaccaggactggacccagtggaacccaagccattcaaatccggaagtgctacttcagacaaccacaaggatgactgatgtagacagaaatggcaccactgcttatgaaggaaactggaacccagaagcacaccctcccctcattcaccatgagcatcatgaggaagaagagaccccacattctacaagcacaatccaggcaactcctagtagtacaacggaagaaacagctacccagaaggaacagtggtttggcaacagatggcatgagggatatcgccaaacacccaaagaagactcccattcgacaacagggacagctgcagcctcagctcataccagccatccaatgcaaggaaggacaacaccaagcccagaggacagttcctggactgatttcttcaacccaatctcacaccccatgggacgaggtcatcaagcaggaagaaggatggatatggactccagtcatagtataacgcttcagcctactgcaaatccaaacacaggtttggtggaagatttggacaggacaggacctctttcaatgacaacgcagcagagtaattctcagagcttctctacatcacatgaaggcttggaagaagataaagaccatccaacaacttctactctgacatcaagcaataggaatgatgtcacaggtggaagaagagacccaaatcattctgaaggctcaactactttactggaaggttatacctctcattacccacacacgaaggaaagcaggaccttcatcccagtgacctcagctaagactgggtcctttggagttactgcagttactgttggagattccaactctaatgtcaatcgttccttatcaggagaccaagacacattccaccccagtggggggtcccataccactcatggatctgaatcagatggacactcacatgggagtcaagaaggtggagcaaacacaacctctggtcctataaggacaccccaaattccagaatggctgatcatcttggcatccctcttggccttggctttgattcttgcagtttgcattgcagtcaacagtcgaagaaggtgtgggcagaagaaaaagctagtgatcaacagtggcaatggagctgtggaggacagaaagccaagtggactcaacggagaggccagcaagtctcaggaaatggtgcatttggtgaacaaggagtcgtcagaaactccagaccagtttatgacagctgatgagacaaggaacctgcagaatgtggacatgaagattggggtgtaacacctacaccattatcttggaaagaaacaaccgttggaaacataaccattacagggagctgggacacttaacagatgcaatgtgctactgattgtttcattgcgaatcttttttagcataaaattttctactctttttgttttttgtgttttgttctttaaagtcaggtccaatttgtaaaaacagcattgctttctgaaattagggcccaattaataatcagcaagaatttgatcgttccagttcccacttggaggcctttcatccctcgggtgtgctatggatggcttctaacaaaaactacacatatgtattcctgatcgccaacctttcccccaccagctaaggacatttcccagggttaatagggcctggtccctgggaggaaatttgaatgggtccattttgcccttccatagcctaatccctgggcattgctttccactgaggttgggggttggggtgtactagttacacatcttcaacagaccccctctagaaatttttcagatgcttctgggagacacccaaagggtgaagctatttatctgtagtaaactatttatctgtgtttttgaaatattaaaccctggatcagtcctttgatcagtataattttttaaagttactttgtcagaggcacaaaagggtttaaactgattcataataaatatctgtacttcttcgatcttcaccttttgtgctgtgattcttcagtttctaaaccagcactgtctgggtccctacaatgtatcaggaagagctgagaatggtaaggagactcttctaagtcttcatctcagagaccctgagttcccactcagacccactcagccaaatctcatggaagaccaaggagggcagcactgtttttgttttttgttttttgttttttttttttgacactgtccaaaggttttccatcctgtcctggaatcagagttggaagctgaggagcttcagcctcttttatggtttaatggccacctgttctctcctgtgaaaggctttgcaaagtcacattaagtttgcatgacctgttatccctggggccctatttcatagaggctggccctattagtgatttccaaaaacaatatggaagtgccttttgatgtcttacaataagagaagaagccaatggaaatgaaagagattggcaaaggggaaggatgatgccatgtagatcctgtttgacatttttatggctgtatttgtaaacttaaacacaccagtgtctgttcttgatgcagttgctatttaggatgagttaagtgcctggggagtccctcaaaaggttaaagggattcccatcattggaatcttatcaccagataggcaagtttatgaccaaacaagagagtactggctttatcctctaacctcatattttctcccacttggcaagtcctttgtggcatttattcatcagtcagggtgtccgattggtcctagaacttccaaaggctgcttgtcatagaagccattgcatctataaagcaacggctcctgttaaatggtatctcctttctgaggctcctactaaaagtcatttgttacctaaacttatgtgcttaacaggcaatgcttctcagaccacaaagcagaaagaagaagaaaagctcctgactaaatcagggctgggcttagacagagttgatctgtagaatatctttaaaggagagatgtcaactttctgcactattcccagcctctgctcctccctgtctaccctctcccctccctctctccctccacttcaccccacaatcttgaaaaacttcctttctcttctgtgaacatcattggccagatccattttcagtggtctggatttctttttattttcttttcaacttgaaagaaactggacattaggccactatgtgttgttactgccactagtgttcaagtgcctcttgttttcccagagatttcctgggtctgccagaggcccagacaggctcactcaagctctttaactgaaaagcaacaagccactccaggacaaggttcaaaatggttacaacagcctctacctgtcgccccagggagaaaggggtagtgatacaagtctcatagccagagatggttttccactccttctagatattcccaaaaagaggctgagacaggaggttattttcaattttattttggaattaaatacttttttccctttattactgttgtagtccctcacttggatatacctctgttttcacgatagaaataagggaggtctagagcttctattccttggccattgtcaacggagagctggccaagtcttcacaaacccttgcaacattgcctgaagtttatggaataagatgtattctcactcccttgatctcaagggcgtaactctggaagcacagcttgactacacgtcatttttaccaatgattttcaggtgacctgggctaagtcatttaaactgggtctttataaaagtaaaaggccaacatttaattattttgcaaagcaacctaagagctaaagatgtaatttttcttgcaattgtaaatcttttgtgtctcctgaagacttcccttaaaattagctctgagtgaaaaatcaaaagagacaaaagacatcttcgaatccatatttcaagcctggtagaattggcttttctagcagaacctttccaaaagttttatattgagattcataacaacaccaagaattgattttgtagccaacattcattcaatactgttatatcagaggagtaggagagaggaaacatttgacttatctggaaaagcaaaatgtacttaagaataagaataacatggtccattcacctttatgttatagatatgtctttgtgtaaatcatttgttttgagttttcaaagaatagcccattgttcattcttgtgctgtacaatgaccactgttattgttactttgacttttcagagcacacccttcctctggtttttgtatatttattgatggatcaataataatgaggaaagcatgatatgtatattgctgagttgaaagcacttattggaaaatattaaaaggctaacattaaaagactaaaggaaacagaaaaaaaaaaaaaaaaa

SEQ ID NO: 162 - DNA, 3242 bp, Homo sapiens
gagcagccaaaaggcccgcggagtcgcgctgggccgccccggcgcagctgaaccgggggccgcgcctgccaggccgacgggtctggcccagcctggcgccaaggggttcgtgcgctgtggagacgcggagggtcgaggcggcgcggcctgagtgaaacccaatggaaaaagcatgacatttagaagtagaagacttagcttcaaatccctactccttcacttactaattttgtgatttggaaatatccgcgcaagatgttgacgttgcagacttggctagtgcaagccttgtttattttcctcaccactgaatctacaggtgaacttctagatccatgtggttatatcagtcctgaatctccagttgtacaacttcattctaatttcactgcagtttgtgtgctaaaggaaaaatgtatggattattttcatgtaaatgctaattacattgtctggaaaacaaaccattttactattcctaaggagcaatatactatcataaacagaacagcatccagtgtcacctttacagatatagcttcattaaatattcagctcacttgcaacattcttacattcggacagcttgaacagaatgtttatggaatcacaataatttcaggcttgcctccagaaaaacctaaaaatttgagttgcattgtgaacgaggggaagaaaatgaggtgtgagtgggatggtggaagggaaacacacttggagacaaacttcactttaaaatctgaatgggcaacacacaagtttgctgattgcaaagcaaaacgtgacacccccacctcatgcactgttgattattctactgtgtattttgtcaacattgaagtctgggtagaagcagagaatgcccttgggaaggttacatcagatcatatcaattttgatcctgtatataaagtgaagcccaatccgccacataatttatcagtgatcaactcagaggaactgtctagtatcttaaaattgacatggaccaacccaagtattaagagtgttataatactaaaatataacattcaatataggaccaaagatgcctcaacttggagccagattcctcctgaagacacagcatccacccgatcttcattcactgtccaagaccttaaaccttttacagaatatgtgtttaggattcgctgtatgaaggaagatggtaagggatactggagtgactggagtgaagaagcaagtgggatcacctatgaagatagaccatctaaagcaccaagtttctggtataaaatagatccatcccatactcaaggctacagaactgtacaactcgtgtggaagacattgcctccttttgaagccaatggaaaaatcttggattatgaagtgactctcacaagatggaaatcacatttacaaaattacacagttaatgccacaaaactgacagtaaatctcacaaatgatcgctatctagcaaccctaacagtaagaaatcttgttggcaaatcagatgcagctgttttaactatccctgcctgtgactttcaagctactcaccctgtaatggatcttaaagcattccccaaagataacatgctttgggtggaatggactactccaagggaatctgtaaagaaatatatacttgagtggtgtgtgttatcagataaagcaccctgtatcacagactggcaacaagaagatggtaccgtgcatcgcacctatttaagagggaacttagcagagagcaaatgctatttgataacagttactccagtatatgctgatggaccaggaagccctgaatccataaaggcataccttaaacaagctccaccttccaaaggacctactgttcggacaaaaaaagtagggaaaaacgaagctgtcttagagtgggaccaacttcctgttgatgttcagaatggatttatcagaaattatactatattttatagaaccatcattggaaatgaaactgctgtgaatgtggattcttcccacacagaatatacattgtcctctttgactagtgacacattgtacatggtacgaatggcagcatacacagatgaaggtgggaaggatggtccagaattcacttttactaccccaaagtttgctcaaggagaaattgaagccatagtcgtgcctgtttgcttagcattcctattgacaactcttctgggagtgctgttctgctttaataagcgagacctaattaaaaaacacatctggcctaatgttccagatccttcaaagagtcatattgcccagtggtcacctcacactcctccaaggcacaattttaattcaaaagatcaaatgtattcagatggcaatttcactgatgtaagtgttgtggaaatagaagcaaatgacaaaaagccttttccagaagatctgaaatcattggacctgttcaaaaaggaaaaaattaatactgaaggacacagcagtggtattggggggtcttcatgcatgtcatcttctaggccaagcatttctagcagtgatgaaaatgaatcttcacaaaacacttcgagcactgtccagtattctaccgtggtacacagtggctacagacaccaagttccgtcagtccaagtcttctcaagatccgagtctacccagcccttgttagattcagaggagcggccagaagatctacaattagtagatcatgtagatggcggtgatggtattttgcccaggcaacagtacttcaaacagaactgcagtcagcatgaatccagtccagatatttcacattttgaaaggtcaaagcaagtttcatcagtcaatgaggaagattttgttagacttaaacagcagatttcagatcatatttcacaatcctgtggatctgggcaaatgaaaatgtttcaggaagtttctgcagcagatgcttttggtccaggtactgagggacaagtagaaagatttgaaacagttggcatggaggctgcgactgatgaaggcatgcctaaaagttacttaccacagactgtacggcaaggcggctacatgcctcagtgaaggactagtagttcctgctacaacttcagcagtacctataaagtaaagctaaaatgattttatctgtgaattcagattttaaaaagtcttcactctctgaagatgatcatttgcccttaaggacaaaaatgaactgaagtttcacatgagctatttccattccagaatatctgggattctactttaagcactacataaactgactttatcctcagaaaaaaaaaaaaaaa

SEQ ID NO: 163 - DNA, 2207 bp, Homo sapiens
actgacggccggccggcttcccggaactggaaggttacattgattacccacctagtacaacatcttacgggaagagcatagtatttcctagaggaatatgaacataacaggaaggtatcattggctctgaattaaatttgaacttgtcccctgaatagctacaggttttggaagctgaatcaatgttatcagatgagttagaatccaaaccagagctcctggtacagtttgttcagaatacgtccatcccattgggacaggggcttgtagaatcagaagctaaagatattacttgcttgtccctccttcccgtgactgaagcctcagaatgcagtcggctaatgttaccagatgatactacaaatcattctaactcctccaaggaggtcccttcctcagctgttttgagaagccttcgggtgaatgtgggtccagacggagaggagacgagagctcagactgtacagaaatccccggagtttttgtccacttcagagtcttctagcttgttgcaagatctacagccaagtgatagcacttcttttattcttcttaacctaacaagagcaggtctgggctcttcagctgagcacttagtgtttgtacaggatgaggcagaagattcagggaatgatttcctctccagtgagagcacagacagtagcattccatggttcctccgggttcaggagttggcccatgacagtttgattgctgctactcgtgcacaactggcaaagaatgcaaaaaccagcagcaatggagaaaatgtccaccttggttctggtgatgggcagtcaaaagattctgggccccttcctcaagtggaaaagaagctcaagtgtacagttgaaggttgtgaccggacatttgtatggccagctcactttaaataccacctcaagactcatcgaaatgaccgctccttcatctgtcctgcagaaggttgtgggaaaagcttctatgtgctgcagaggctgaaggtgcacatgaggacccacaatggagagaagccctttatgtgccatgagtctggctgtggtaagcagtttactacagctggaaacctgaagaaccaccggcgcatccacacaggagagaaacctttcctttgtgaagcccaaggatgtggccgttcctttgctgagtattctagcctccgaaaacatctggtggttcactcaggagagaagcctcatcagtgccaagtctgtgggaagaccttctctcagagtggaagcaggaatgtgcatatgagaaagcatcacctgcagctgggagcagctgggagtcaagagcaggagcaaactgctgagccactaatgggcagtagtttgcttgaagaggcttcagtacccagtaaaaacctggtgtctatgaattcccagcccagccttggtggagagtccttgaacctaccaaataccaattctatcctgggagttgatgatgaggtgcttgctgaaggatccccacgttccctgtcttcagtgcctgatgtgacacatcacctggtgaccatgcagtcagggaggcaatcatatgaagtttctgtcttaactgcagtaaatccacaagagttactaaaccaaggagatttaactgaaagacggacatgagcgtgggtgctgactcctggaagagcaactctatctgatctcaaaatgcgtatactgggaacaggatgccttagcccacaacagaaccagaatgaatctttgaaggcacaagactctgcttttgccactcttcctctttcctggtatagaagatggatgtaggagagcttcttttctaactaccatctgatcagacaaggaatgaagcaatgactgtgggctgggaaactgtacctacctctcttcccactgcaaatttctgggatagaccaaaagtgaatttgattatgtgttggctgaagttcttcattctgactgttgaggggaggttttcctttgaagagttttcatcccagactcagctgtcttttcacatggatgaaataattcctgctaccaacaacagagcttcaccaggaagttgagttttcaagatgccttgttgctttgaagaagggagtgatgtcaattctcttgttacattctccctttagcaacctgagtaagagactctctgccactgggctgcaaaaaaataaattacttgaatctccccttgaaaaaaaaaaaaaaaaaaaaaaaaaaaaa

SEQ ID NO: 164 - DNA, 1758 bp, Homo sapiens
ctgctgtctgcggaggaaactgcatcgacggacggccgcccagctacgggaggacctggagtggcactgggcgcccgacggaccatccccgggacccgcctgcccctcggcgccccgccccgccgggccgctccccgtcgggttccccagccacagccttacctacgggctcctgactccgcaaggcttccagaagatgctcgaaccaccggccggggcctcggggcagcagtgagggaggcgtccagccccccactcagctcttctcctcctgtgccaggggctccccgggggatgagcatggtggttttccctcggagccccctggctcgggacgtctgagaagatgccggtcatgaggctgttcccttgcttcctgcagctcctggccgggctggcgctgcctgctgtgcccccccagcagtgggccttgtctgctgggaacggctcgtcagaggtggaagtggtacccttccaggaagtgtggggccgcagctactgccgggcgctggagaggctggtggacgtcgtgtccgagtaccccagcgaggtggagcacatgttcagcccatcctgtgtctccctgctgcgctgcaccggctgctgcggcgatgagaatctgcactgtgtgccggtggagacggccaatgtcaccatgcagctcctaaagatccgttctggggaccggccctcctacgtggagctgacgttctctcagcacgttcgctgcgaatgccggcctctgcgggagaagatgaagccggaaaggaggagacccaagggcagggggaagaggaggagagagaagcagagacccacagactgccacctgtgcggcgatgctgttccccggaggtaacccaccccttggaggagagagaccccgcacccggctcgtgtatttattaccgtcacactcttcagtgactcctgctggtacctgccctctatttattagccaactgtttccctgctgaatgcctcgctcccttcaagacgaggggcagggaaggacaggaccctcaggaattcagtgccttcaacaacgtgagagaaagagagaagccagccacagacccctgggagcttccgctttgaaagaagcaagacacgtggcctcgtgaggggcaagctaggccccagaggccctggaggtctccaggggcctgcagaaggaaagaagggggccctgctacctgttcttgggcctcaggctctgcacagacaagcagcccttgctttcggagctcctgtccaaagtagggatgcggatcctgctggggccgccacggcctggctggtgggaaggccggcagcgggcggaggggatccagccacttccccctcttcttctgaagatcagaacattcagctctggagaacagtggttgcctgggggcttttgccactccttgtcccccgtgatctcccctcacactttgccatttgcttgtactgggacattgttctttccggccaaggtgccaccaccctgccccccctaagagacacatacagagtgggccccgggctggagaaagagctgcctggatgagaaacagctcagccagtggggatgaggtcaccaggggaggagcctgtgcgtcccagctgaaggcagtggcaggggagcaggttccccaagggccctggcacccccacaagctgtccctgcagggccatctgactgccaagccagattctcttgaataaagtattctagtgtggaaaaaaaaaaaaaaaaaaaaaaaaaaaaaa

SEQ ID NO: 165 - DNA, 3653 bp, Homo sapiens
acgcggcgctcgcgctccctccttaaatgagcctgggcgccccgcgcccgccacttcagtggatcccgcgccggggccgcgggcggagctgcctgccggtcccgcgccgcgcgtccgcactcctcggccctcgggcggtcgatgggacggggcgccgcggagcaggaggcggcgcccgtcggggtgctcgggccgcgcgggagcccactgtggggctcgggcatggcgggccgcaggacctgagctctcctcaggggagcggggaggcagctgctggccggcgatggggacggagtggggccgtcgccgccgcgccgagccgtgagcgccgagccaccgccgccgctacctcagcccttcgcgaagcgccgggcagctcgggaacatggccctggagcggctctgctcggtcctcaaagtgttgttaataacagtactggtagtggaagggattgccgtggcccaaaaaacccaagatggacaaaatattggaatcaagcatattcctgcaacccagtgtggcatttgggttcgaaccagcaatggaggtcattttgcttcgccaaattatcctgactcatatccaccaaacaaggagtgtatctacattttggaagctgctccacgtcaaagaatagagttgacctttgatgaacattattatatagaaccatcatttgagtgtcggtttgatcacttggaagttcgagatgggccatttggtttctctcctcttatagatcgttactgtggcgtgaaaagccctccattaattagatcaacagggagattcatgtggattaagtttagttctgatgaagagcttgaaggactgggatttcgagcaaaatattcatttattccagatccagactttacttacctaggaggtattttaaatcccattccagattgtcagttcgagctctcgggagctgatggaatagtgcgctctagtcaggtagaacaagaggagaaaacaaaaccaggccaagccgttgattgcatctggaccattaaagccactccaaaagctaagatttatttgaggttcctagattatcaaatggagcactcaaatgaatgcaagagaaacttcgttgcagtctatgatggaagcagttctattgaaaacctgaaggccaagttttgcagcactgtggccaatgatgtaatgcttaaaacaggaattggagtgattcgaatgtgggcagatgaaggtagtcggcttagcaggtttcgaatgctctttacttcctttgtggagcctccctgcacaagcagcactttcttttgccatagcaacatgtgcatcaataattctttagtctgtaatggtgtccaaaattgtgcatacccttgggatgaaaatcattgtaaagaaaagaaaaaagcaggagtatttgaacaaatcactaagactcatggaacaattattggcattacttcagggattgtcttggtccttctcattatttctattttagtacaagtgaaacagcctcgaaaaaaggtcatggcttgcaaaaccgcttttaataaaaccgggttccaagaagtgtttgatcctcctcattatgaactgttttcactaagggacaaagagatttctgcagacctggcagacttgtcggaagaattggacaactaccagaagatgcggcgctcctccaccgcctcccgctgcatccacgaccaccactgtgggtcgcaggcctccagcgtcaaacaaagcaggaccaacctcagttccatggaacttcctttccgaaatgactttgcacaaccacagccaatgaaaacatttaatagcaccttcaagaaaagtagttacactttcaaacagggacatgagtgccctgagcaggccctggaagaccgagtaatggaggagattccctgtgaaatttatgtcagggggcgagaagattctgcacaagcatccatatccattgacttctaatcttctgctaatggtgatgtgaattcttagggtgtgtacgtacgcagcctccagggcaccatactgtttccagcagccaacccttttctcccatcacaactacgaagaccttgatttaccgttaacctattgtatggtgatgtttttattctctcaggcagtctatatatgttaaaccaatcaaggaacttactctattcagtggaaacaataatcatctctattgcttggtgtcatttataggaagcactgccagttaaagagcattagaagaggtggttggatggagccaggctcaggctgcctcttcgttttagcaacaagaagactgctcttgactgataacagctctgtcaatattttgatgccacaataaacttgatttttctttacattccttttatttttcctttctctaaatttaatttgttttataagcctatcgttttaccatttcattttcttacataagtacaagtggttaatgtaccacatacttcagtataggcatttgttcttgagtgtgtcaaaatacagctagttactgtgccaattaagacccagttgtatttcacccatctgtttcttcttggctaatctctgtacttctgccttttaattactgggcccttattccttattttctgtgagaaataatagatgatatgatttattacctttcaattatatttttctcagttatactagaaaatttcataatcctgggatatatgtaccattgtcagctatgactaaaaatttgaaaaagataaaaatttctagcaagcctttgaagtttaccaagtatagtcacattcagtgacagcccattcattccagtaaagaatcatttcattcactttgggagaggcctataattacatttatttgcaatgtttctcttcgctagattgttacatagctcccattctgttggttttgcttacagcatatggtaaccaaggttagatgccagttaaaattccttagaaattggatgagccttgagattgcttcttaactgggacatgacatttttctagctcttatcaagaataacaacttccacttttttttaaactgcacttttgactttttttatggtataaaaacaataatttataaacataaaagctcattgtgttttttagacttttgatattatttgatactgtacaaactttattaaatcaagatgaaagacctacaggacagattcctttcagtgttcacatcagtggctttgtatgcaaatatgctgtgttggacctggacgctataacttattgtaaagaccttggaaatgtggacataagctctttctttccttttgttactgtatttagtttgtgataaatttttcactgtgtgatatttatgctctaaatcactacacaaatcccatattaaaatatacattgtacctgaccctttaatcatgttatttatgccaccaaggttgtggatcttaaggtatgtatggaaaggaactcatttatcaaattgtaagtaatacagacatgccatttaaaagaggtaaattcttgttttctatattttgttagtaaattctcaatgaaataagttgaagtttcactggatttcattaacttttaaatattacatatatgtgttttctcagattagtgaaaattgtgaccttaaatttaatacacatatactgcctcag

SEQ ID NO: 166 - DNA, 4682 bp, Homo sapiens
cttacggcagtctcgcgggatttccccctctcgcgggaattatttgaacgttcgagcggtaaatactccctggggctgtcatagaagactactcggagagcgctgcctctgggttggcgggctggcaggctgtagccgagcgcgggcaggactcgtcccggcagggttccagagccatgggagcggaaaggaggctgctgtcgattaaggaggcctttcggctggcgcagcagccgcaccagaaccaggcgaagctggtggtggcgctgagccgcacctaccgcacgatggatgataagacagtttttcatgaggagttcattcattaccttaaatatgttatggtggtctataaacgtgaaccagctgtggagagggtaatagaatttgcagcaaagtttgttacctcatttcaccaatcagatatggaagatgatgaggaagaggaagatggtggccttttaaattatttgtttacttttctcttaaagtctcatgaagcaaacagcaatgcagtgagatttagagtgtgcctgctcataaacaagcttttgggaagtatgccagaaaatgctcagattgatgatgatgtgtttgataaaattaataaagccatgcttattagattgaaagataagattccaaatgtgagaatacaggcagttctggcgctttcacgacttcaggatcccaaggatgatgaatgcccagtggttaatgcatatgctactttgattgaaaatgattcaaatccagaagttagacgggcagtgttatcatgtattgcaccatcagcaaagactttgccaaaaattgtagggcgcaccaaggatgtgaaagaggctgtcagaaagctggcttatcaggttttagctgaaaaggttcatatgagagctatgtccattgctcagagagtaatgctccttcaacaaggtcttaatgacagatcagatgctgtgaaacaagctatgcagaagcatcttcttcaaggctggttacggttctctgaaggaaatatcttagagttgctccatcggttggatgtagaaaattcttctgaagtggcagtctctgttctcaatgccttgttttcaataactcctctcagtgaactggtgggactctgtaaaaacaatgatggcaggaaattgattccagtggaaacattaactcctgaaattgctttgtattggtgtgccctttgtgaatatttgaaatcaaaaggagatgaaggtgaagaatttttagagcagattttgccagagcctgtagtatatgcagactatttattgagttacatccagagcattccagttgttaatgaagaacacagaggtgatttttcctatattggaaatttgatgacaaaagaattcataggtcaacaattgattctaattattaagtctttggataccagtgaagaaggaggaagaaaaaaactgctggctgttttacaggagattcttattttacccacaatcccaatatccctggtttcttttcttgttgaaagactactccacatcattatagatgataataagagaacacaaattgttacagaaattatctcagagattcgggcgcccattgttactgttggtgttaataacgatccagctgatgtaagaaagaaagaactcaagatggctgaaataaaagttaagcttatcgaagccaaagaagctttggaaaattgcattaccttacaggattttaatcgggcatcagaattaaaagaagaaataaaagcattagaagatgccagaataaaccttttgaaagagacagagcaacttgaaattaaagaagtccacatagagaagaatgatgctgaaacattgcagaaatgtcttattttatgctatgaactgttgaagcagatgtccatttcaacaggcttaagtgcaaccatgaatggaatcatcgaatctttgattcttcctggaataataagtattcatcctgttgtaagaaacctggctgttttatgcttgggatgctgtggactacagaatcaggattttgcaaggaaacacttcgtattactattgcaggttttgcaaattgatgatgtcacaataaaaataagtgctttaaaggcaatctttgaccaactgatgacgttcgggattgaaccatttaaaactaaaaaaatcaaaacacttcattgtgaaggtacagaaataaacagtgatgatgagcaagaatcaaaagaagttgaagagactgctacagctaagaatgttctgaaactcctttctgatttcttagatagtgaggtatctgaacttaggactggagctgcagaaggactagccaagctgatgttctctgggcttttggtcagcagcaggattctttctcgtcttattttgttatggtacaatcctgtgactgaagaggatgttcaacttcgacattgcctaggcgtgttcttccccgtgtttgcttatgcaagcaggactaatcaggaatgctttgaagaagcttttcttccaaccctgcaaacactggccaatgcccctgcatcttctcctttagctgaaattgatatcacaaatgttgctgagttacttgtagatttgacaagaccaagtggattaaatcctcaggccaagacttcccaagattatcaggccttaacagtacatgacaatttggctatgaaaatttgcaatgagatcttaacaagtccgtgctcgccagaaattcgagtctatacaaaagccttgagttctttagaactcagtagccatcttgcaaaagatcttctggttctattgaatgagattctggagcaagtaaaagataggacatgtctgagagctttggagaaaatcaagattcagttagaaaaaggaaataaagaatttggtgaccaagctgaagcagcacaggatgccaccttgactacaactactttccaaaatgaagatgaaaagaataaagaagtatatatgactccactcaggggtgtaaaagcaacccaagcatcaaagtctactcagctaaagactaacagaggacagagaaaagtgacagtttcagctaggacgaacaggaggtgtcagactgctgaagccgactctgaaagtgatcatgaagttccagaaccagaatcagaaatgaagatgagactaccaagacgagccaaaaccgcagcactagaaaaaagtaaacttaaccttgcccaatttctcaatgaagatctaagttaggaaagacgatggaggtggaatcctttaagattatgtccagttatttgctttaataaagaagaagttacccttgtcaaaatcagaacaaacctgatgtctttctgaagattttctgctgtgcgcttccacgttactttggcctgtattaaagcagtagagcagcatcagttattatagtccagaaaaagtgtgcatcagtcagtcacacagatttatcacaatctgaggtgggcctaggaatctcatttttaaatagtctctccaagtgattcttatgaactctttatgtttaaaatcatgtcattatggaaaacttacaagtgtaactagctagtagcttgcatttgagaagcttatgacttagatgggcagaatcaacaaagatgaaaccgcctgaggacacatttaacaagtaacatttctagggaaaatgaaggaagtaccacaaactggctagaaaggagcttatcaatcaccagtgaggaagaccagtataacgttcaacaacagttattttgacaaaaacttattttgtgattcctacagtgaaaacatttttggtgatatctgcctgggaaatctctcttcctaaagtatttgtatatgggagtccttgtttgtgaatgtttcctggattagggaggtgtcaacataaatgtattattaaccatgaagctgctcgctatatttttggcataacaaaataatatttatttactgtggataataattctagtgggaatataatgtgacaggaacttctctttatatacgctaccaatttatgagcactattcactgtcaatttcatttcttgtcttttgaaattgacacttggcctgacttacgaaacttgtactatatgaaattggtcctcttttctgcaatacccaacgaaacaccttttctctttattattcagaaatgtcctaacatggatctgtttgttttaataattgtgctttttttaggcttatcatctactagaggccatttacttaaggtgaaattttaagatggagctaaagtaagatcactggtttttagaaccaaattgctatacatatgtgcctcatagaacttataaaaggagtcaaagtttcaaagcaagatagttattaagcaaaaggaaaaatggtaatgatagaaagtcagttaaaaatagatgattgttcttcattctgtttgttggctctgtgttctcctgtgcttcagattccttatgtgttgttgttttaaagacaatttgcagggggttgggagaaggactgaaaaggtacattaagtgtgctgtaaggaaaagtcttagaaacataataagctaaaatcccattcacacatggccaggctatccaaaaagaaaggagccatgttctcatgtggtttaccataccaaagcttgctttctctggcatgggaaaaataaatttaagcaccaaaaaaaaaaaaaaaagaaaa

SEQ ID NO: 167 - DNA, 8415 bp, Homo sapiens
tcgttctcatttgggtgtctgcactgttggaagctactgcactgtgtttccacgcagacagagtacagtgggaaaggctttctccagctgatggatggctgttctctttatttggagtatcttactggttatgtaagcgacctcgagagaaattatcctgacccagatcggaggatgcagtagtgcttcagctgcaggatttcttagtcgttaacaccacagtgctgatgacaaagagcgagttgtaatcctcatcactgccagggctgagccagagcagacagaaaatcgtcatttgctcgttggagacttgttaggttacagctcctgcttcgttctgtggtcttggcttttcttcctatacaatgacgccgctgcaagtgagctcagaaatgcttggtttgagagccatttgcctgtgatttttgaagactaaagaagtatttacactagatactcttccagaacaaaatagaaatttcagcaaatacttactgacctttaaagccttgttgtggatttctgagatttaaagatactttaaaattctcaagaacaaagtccttattccttaaatggatacagagtgagagtatatagacaagactctgccacccagtggtttactggcataattactcatcatgatctcttcacccgcaccatgatcgttatgaatgatcaggtactagaaccacagaatgtcgatccttctatggttcaaatgacctttctagatgatgttgttcactctttgttaaaaggtgaaaatattggcattacatcacgacgcaggtctcgtgccaatcaaaacgtcaacgctgttcacagccattatacacgtgcccaagcaaatagtcccagaccagcaatgaactcccaagctgctgtaccaaaacagaatacacaccagcaacagcaacaaagaagtatccgtccaaataagaggaagggctcagatagcagtataccagatgaagagaagatgaaggaggaaaaatatgattatatatcacgaggagaaaatcctaaaggtaaaaacaaacacttgatgaataaaagaaggaaacctgaggaggatgaaaagaaactaaatatgaaaagacttcgaactgacaatgtttcagacttttctgagagcagtgactcagaaaattcaaataagagaataatagataattcctcagaacagaagccagagaatgaattgaaaaataaaaatacttcaaaaataaatggagaagaaggaaaaccccataataatgagaaggcaggagaagagaccctaaaaaatagccagcctccctgggatcaaatacaggaagataaaaaacatgaagaagcagagaagcggaagtctgttgacactcagcttcaagaagatatgattattcattcgtcagaacagtccacagtttctgatcataattctaatgatttacttcctcaggaatgcaatatggataaaacacataccatggaattgctaccaaaggagaagtttgtatccagaccacccacaccaaaatgtgttattgatattacaaatgacactaatttagaaaaggtggctcaggaaaactcaagtacctttggccttcagacacttcagaaaatggatcctaatgttagtgattcaaaacactctattgcaaatgcaaaattcttggaaacagcaaaaaaagattctgaccagagctgggtcagtgatgtagttaaagtggatctaacccaatcaagtgttacaaatgcttcttcaggaaatgatcacttgaacatggaaaaagagaagtatgtctcttacatttctcctttaagtgcagtttctgtcatggaagataagctgcataagcgaagtccacctccagagactataaaatctaaacttaatacttcagtagatactcacaagataaaatccagcccatcacctgaagttgttaaacccaaaataactcattctcctgattctgtaaagtctaaggccacttatgtgaacagccaagctactggtgaaagaagattggcaaataagatagaacatgagctatcaagatgcagttttcatccaattcctactcgaagcagtacattagaaactacaaagagtcctcttatcattgataaaaatgagcattttacagtttacagagatcctgcacttattgggtcagaaacaggagctaatcatatttcacctttcctaagccagcatccttttcctcttcactcctcatctcatagaacctgtttaaatccaggtacccatcatcctgccttaactcctgcaccccatttactagccggatcatctagtcaaactccattacctaccattaacactcatcctctgactagtggtccacaccatgctgttcatcaccctcatttacttcccactgtgttacctggagtgcctactgcctccttacttggtggccacccacgactagagagtgctcatgccagcagcttgagccacttagcgctagcacaccagcaacaacaacagttgttacagcaccagtcacctcatcttcttggacaagcccatccttctgcttcatataatcagcttggactttatccaattatttggcagtatccaaatggaacacatgcatactcaggacttggtttgccttcttctaagtgggttcacccagaaaatgcagttaatgctgaagcttcattaaggaggaattctcccagtccttggctacatcagcccacccctgtgacctcagcagatggtattggattacttagtcacattcctgtcagaccttccagtgcagagcctcatcggcctcttaaaattacagcccattccagtccaccattgacaaaaactttagtagatcatcataaggaagaattagaaagaaaagcttttatggaaccattacggtctgttgcatccacatcagccaaaaatgacctggatctaaataggtcacagactggaaaagattgtcacttacataggcattttgtggatccagtattaaatcagttacagaggccaccccaggagactggagagaggttaaacaaatacaaagaggaacaccgtcgaattcttcaagaaagtattgatgttgctccctttacaactaaaatcaagggacttgagggtgagagagagaattattccagagtggcatcatcatcttccagtcctaaaagccatatcatcaaacaagatatggatgtagaacgctcagtatcagatctttataaaatgaagcactcagtgcctcagagtttaccccaaagtaactatttcactacattgtctaatagtgtggtcaatgaaccaccaagatcatacccatccaaagaagtttcaaatatttacggtgataaacagagtaatgcccttgcagcggcagcagctaatcctcaaactctgacttcatttataacatctctttcaaagcctccacctttgattaaacaccaaccagaaagtgaaggtttagtaggcaagataccagaacatcttccacatcagattgcatctcactcagtaacaaccttcagaaatgattgtaggagtcctacccatttgacagtttcttctacaaatacactccgcagtatgcctgcattacatagagcaccagtatttcacccaccaatccatcacagcctggaaagaaaggaaggcagctatagtagtctttcccctccaactttaactccggtgatgccagtaaatgctggtggtaaagttcaagaatcacagaagcctccaactctaatacccgaaccaaaagactcccaggcaaattttaagagttcttcagaacagagtttgacggagatgtggagacctaataataacctcagcaaagagaaaactgaatggcatgtggagaaaagcagcggaaagttacaggctgctatggcatctgtcattgtgcgtccatcttctagtacaaaaactgatagtatgccagcaatgcagttagcttctaaagatcgagttagtgaaagatcttcagctggggcacataaaacagattgcctcaaactagcagaagccggagaaactggaagaatcattttgccaaatgtgaattcagacagtgttcacacaaaatctgaaaaaaactttcaggctgtctcacagggcagtgttcccagttcagtcatgtctgctgtaaatacgatgtgtaataccaaaacggatgtaatcacatctgctgccgatactaccagtgtttccagctggggtggttcagaagtaatttcctctttatcaaataccattttggcctctacatcatcagaatgtgtatcttcaaaaagtgtcagtcagccagtggctcaaaaacaagaatgcaaggtcagcaccacagcaccagttacattagccagtagtaagacaggaagtgttgttcaacccagttctgggttctcaggcacaactgattttatccatttaaaaaagcacaaggcagcattggctgcagctcagtataaaagtagtaatgccagtgagactgaacctaatgctataaaaaatcagacactttcagcctcccttcctctggatagcactgtaatctgtagtacaattaacaaagcaaactctgtaggaaatgggcaagcttcccagacaagtcaaccaaactaccatactaaactgaaaaaggcctggctcaccagacactcagaagaagataaaaatactaataaaatggaaaattcagggaattctgtatcagaaattattaagccatgttctgtcaacttaatagcctctacatctagtgatatacaaaatagtgtagatagtaagatcatagttgataaatatgtaaaagatgataaagtcaacaggagaaaagccaaaagaacttatgaatctggctctgaaagtggagactcagatgaaagtgaaagcaagtcagagcaaaggactaaaagacaacctaagccaacttacaaaaagaagcaaaatgatttgcaaaagagaaaaggtgaaatagaagaagatttgaaacccaatggagttctcagcaggagtgccaaagaaagaagtaaactgaagttgcaaagcaacagtaatactggcattcctcgttcagtattgaaagattggcgtaaagtcaagaagctgaagcaaactggggaatcctttttacaggatgactcctgctgtgagatagggcctaatttacaaaagtgtcgagaatgtagacttattcgcagtaaaaaaggagaagaaccagctcactcaccagtattttgtagattttactactttagacggttgtcatttagtaaaaacggagtagttagaatagatggtttctcttctcctgaccaatatgatgatgaagctatgagtttgtggacacatgaaaattttgaagatgatgaactagatatagagacttctaaatatatcttggatataataggtgataagttctgtcaattagtaacatctgaaaaaacagctttgtcctgggtgaaaaaggatgccaaaattgcctggaaaagagcagtgagaggagtccgggagatgtgtgatgcatgtgaagcaacattgtttaacattcactgggtctgccaaaaatgtggatttgtggtctgcttagattgttacaaggcaaaggaaaggaagagttctagagataaagaactatatgcttggatgaagtgtgtgaagggacagcctcatgatcacaaacatttaatgccaacccaaattatacctggttctgttttgacagatcttctagatgccatgcacactcttagggaaaaatatggtattaaatcccattgtcattgtactaacaaacagaatttacaagttggaaattttcctacaatgaatggtgtatctcaatctcagcagcaaaatactcctccgaagtctgagaaaaatggtggcagcagcccagagagtgatgtaggcacagataacaagttaactcctccagaatcccagtcaccactgcactggttagcagatcttgcagagcaaaaagccagagaggaaaaaaaagaaaacaaagaacttacccttgaaaaccaaattaaagaagaaagagaacaagacaactctgaatctccaaatggcagaacatcacctcttgtgtcccagaataatgaacaaggctcaaccttacgggatttgctgactacaacagctggaaagctacgtgtggggtctacagatgctggcattgcctttgccccagtatattcaatgggagccccaagtagcaaaagtggacggactatgcctaacattcttgatgacataattgcttcagttgttgaaaacaaaattccaccaagtaaaacctccaagataaatgtaaaaccagagcttaaagaagagcctgaagaaagcataatatctgcagtggatgaaaataataaattatacagtgatataccacattcttggatctgtgagaagcatattttatggcttaaggattataagaatagcagtaattggaagcttttcaaagaatgttggaaacaaggacagcctgcagtggtttctggtgtgcataagaaaatgaacattagcctatggaaggcggaatcaattagtcttgattttggagaccaccaagctgatctcctgaactgcaaagatagcatcatttcaaatgccaatgttaaggaattctgggatggttttgaagaagtttcaaaacggcagaaaaacaagagtggagaaacagttgttttaaaattgaaagactggccttcaggagaagacttcaagactatgatgccagcaagatacgaagatcttttaaaaagtctgccattgccagaatattgtaatccagaaggaaaattcaatttggcctctcatttgccaggattttttgtacgtcctgatctaggacccaggttgtgcagtgcctatggtgtagttgctgctaaagatcatgatataggaacaacaaatctccatattgaagtttctgatgttgtaaatatactagtttatgttggcatagcaaaaggaaatggcattctctcaaaagcaggaattctcaagaaatttgaggaagaagatttggatgacattttaaggaaaagattgaaggactcaagtgaaatacctggtgctctgtggcatatttatgctgggaaagatgttgacaagataagggaatttcttcaaaagatttcaaaagaacaaggccttgaagttctaccagaacatgatccaatacgtgaccaaagttggtatgtgaacaaaaagctccgtcaaaggctgcttgaagaatatggagtcagaacctgtactcttattcagttccttggtgatgctattgttttgccagcgggagcacttcatcaggttcagaattttcacagctgtattcaggtaactgaagattttgtgtctccagaacatcttgtagagtcatttcatttaacacaggaactgagacttttgaaggaagaaatcaattatgatgataaactacaggttaaaaatattttgtatcatgcagtcaaagaaatggtgagagccttgaagatacacgaggatgaagtagaggatatggaagaaaattaagtgtgatccagtttgatatttttaggttgttgaactgggattacttaaccttgaatgatgatatgtatgcacactgactttaagcttcataaaaccatcagtgccaagaaattctctttgtagtaattacttgttactgacaccacagcagtatagcatatgtcacagctcctgtgattcaatgttataaaacaagcagaattttaaaagcagcactatatagctgttttgtattatagtgtatatgatgtttgtgaaaatgccagatttaaaatgatgtatttatttttggtaaaaaataaaaaattctatgctatattgttgatcaagtgtaaatgtgaccttgtacagtttactaaaattactgatatttttcactacattgagacagttactgtgagaataggacacaaacaccagctattgcctgcatctgggaaattgctgaatcgcacagcagtcatgtcataatcagaaaattactgccaaataattgtaaaatttgtaaagtataaagtatataaagtagatactaaatacagacacttcaatattttgttgaagctattgactgtacaattaaacattttcaaaaggtgtaatttatttaaaattgtctcattttggtaaaatttatgtgaacttttaaagctaaatattaaacttaatatgctatgtaaatatatacatatatacatttaatgatgtatttttttaaaacattggcttgcttttgttaaagtgcaagtgttacatatggctttgtacattaaagttgaaaggggttttacattttccattaaaaggactttatcaaaaaaaaaaaaaaaaaaaaaaaa

SEQ ID NO: 168 - DNA, 447 bp, Homo sapiens
cccgagcgccggccgggccatgacccccgctgctctgtcttgcaggctcgtcgccgcggccccccgagcccgaccgccgccgccaccaccaccagcgcccgggcgggcctcgcgcgcctcgggcgcggctccgcagtgagcccaccaagaaggaagcggcctgcagaggtgccgacatggggcttaagatgtcctgcctgaaaggctttcaaatgtgtgtcagcagcagcagcagcagccacgacgaggcccccgtcctgaacgacaagcacctggacgtgcccgacatcatcatcacgccccccacccccacgggcatgatgctgccgagggacttggggagcacagtctggctggatgagacagggtcgtgcccagatgatggagaaatcgacccagaagcctgaggaggtgtcctgggtttggctggctggctcctgctccagc

SEQ ID NO: 169 - DNA, 1070 bp, Homo sapiens
atgttttgttgcttaggatatgaatggctgagcggaggctgtaaaacctggcactctgcttgggttatcaatactctggctgaccatcgtcatcgtgggactgactttggtggaagtccttggttacttatcattactgtgtttctgagaagttataaatttgccatctccctctgcacaacttacctttgtgtgtctttcctgaagactatcttcccgtctcaaaatggacatgatggatccacggatgtacagcagagagccaggaggtccaaccgccgtagacaggaaggaattaaaattgtcctggaagacatctttactttatggagacaggtggaaaccaaagttcgagctaaaatccgtaagatgaaggtgacaacaaaagtcaaccgtcatgacaaaatcaatggaaagaggaagaccgccaaagaacatctgaggaaactaagcatgaaagaacgtgagcacggagaaaaggagaggcaggtgtcagaggcagaggaaaatgggaaattggatatgaaagaaatacacacctacatggaaatgtttcaacgtgcgcaagcgttgcggcggcgggcagaggactactacagatgcaaaatcaccccttctgcaagaaagcctctttgcaaccgggtcagaatggcggcagtggagcatcgtcattcttcaggattgccctactggccctacctcacagctgaaactttaaaaaacaggatgggccaccagccacctcctccaactcaacaacattctataattgataactccctgagcctcaagacaccttccgagtgtctgctcactccccttccaccctcagctctaccctcagcggatgataatctcaagacacctgcggagtgtctgctctatccccttccaccctcagcggatgataatctcaagacacctcccgagtgtctgctcactccccttccaccctcagctccaccctcagcggatgataatctcaagacacctcccgagtgtgtctgctcactccccttccaccctcagcggatgataatctcaagaaactaaggaagaataaataaata

SEQ ID NO: 170 - DNA, 3926 bp, Homo sapiens
atgagtacagaaagagactcagaaacgacatttgacgaggattctcagcctaatgacgaagtggttccctacagtgatgatgaaacagaagatgaacttgatgaccaggggtctgctgttgaaccagaacaaaaccgagtcaacagggaagcagaggagaaccgggagccattcagaaaagaatgtacatggcaagtcaaagcaaacgatcgcaagtaccacgaacaacctcactttatgaacacaaaattcttgtgtattaaggagagtaaatatgcgaataatgcaattaaaacatacaagtacaacgcatttacctttataccaatgaatctgtttgagcagtttaagagagcagccaatttatatttcctggctcttcttatcttacaggcagttcctcaaatctctaccctggcttggtacaccacactagtgcccctgcttgtggtgctgggcgtcactgcaatcaaagacctggtggacgatgtggctcgccataaaatggataaggaaatcaacaataggacgtgtgaagtcattaaggatggcaggttcaaagttgctaagtggaaagaaattcaagttggagacgtcattcgtctgaaaaaaaatgattttgttccagctgacattctcctgctgtctagctctgagcctaacagcctctgctatgtggaaacagcagaactggacggagaaaccaatttaaaatttaagatgtcacttgaaatcacagaccagtacctccaaagagaagatacattggctacatttgatggttttattgaatgtgaagaacccaataaccgactagataagtttacaggaacactattttggagaaacacaagttttcctttggatgctgataaaattttgttacgtggctgtgtaattaggaacaccgatttctgccacggcttagtcatttttgcaggtgctgacactaaaataatgaagaatagtgggaaaaccagatttaaaagaactaaaattgattacttgatgaactacatggtttacacgatctttgttgttcttattctgctttctgctggtcttgccatcggccatgcttattgggaagcacaggtgggcaattcctcttggtacctctatgatggagaagacgatacaccctcctaccgtggattcctcattttctggggctatatcattgttctcaacaccatggtacccatctctctctatgtcagcgtggaagtgattcgtcttggacagagtcacttcatcaactgggacctgcaaatgtactatgctgagaaggacacacccgcaaaagctagaaccaccacactcaatgaacagctcgggcagatccattatatcttctctgataagacggggacactcacacaaaatatcatgacctttaaaaagtgctgtatcaacgggcagatatatggggaccatcgggatgcctctcaacacaaccacaacaaaatagagcaagttgattttagctggaatacatatgctgatgggaagcttgcattttatgaccactatcttattgagcaaatccagtcagggaaagagccagaagtacgacagttcttcttcttgctcgcagtttgccacacagtcatggtggataggactgatggtcagctcaactaccaggcagcctctcccgatgaaggtgccctggtaaacgctgccaggaactttggctttgccttcctcgccaggacccagaacaccatcaccatcagtgaactgggcactgaaaggacttacaatgttcttgccattttggacttcaacagtgaccggaagcgaatgtctatcattgtaagaaccccagaaggcaatatcaagctttactgtaaaggtgctgacactgttatttatgaacggttacatcgaatgaatcctactaagcaagaaacacaggatgccctggatatctttgcaaatgaaactcttagaaccctatgcctttgctacaaggaaattgaagaaaaagaatttacagaatggaataaaaagtttatggctgccagtgtggcctccaccaaccgggacgaagctctggataaagtatatgaggagattgaaaaagacttaattctcctgggagctacagctattgaagacaagctacaggatggagttccagaaaccatttcaaaacttgcaaaagctgacattaagatctgggtgcttactggagacaaaaaggaaactgctgaaaatataggatttgcttgtgaacttctgactgaagacaccaccatctgctatggggaggatattaattctcttcttcatgcaaggatggaaaaccagaggaatagaggtggcgtctacgcaaagtttgcacctcctgtgcaggaatctttttttccacccggtggaaaccgtgccttaatcatcactggttcttggttgaatgaaattcttctcgagaaaaagaccaagagaaataagattctgaagctgaagttcccaagaacagaagaagaaagacggatgcggacccaaagtaaaaggaggctagaagctaagaaagagcagcggcagaaaaactttgtggacctggcctgcgagtgcagcgcagtcatctgctgccgcgtcacccccaagcagaaggccatggtggtggacctggtgaagaggtacaagaaagccatcacgctggccatcggagatggggccaatgacgtgaacatgatcaaaactgcccacattggcgttggaataagtggacaagaaggaatgcaagctgtcatgtcgagtgactattcctttgctcagttccgatatctgcagaggctactgctggtgcatggccgatggtcttacataaggatgtgcaagttcctacgatacttcttttacaaaaactttgcctttactttggttcatttctggtactccttcttcaatggctactctgcgcagactgcatacgaggattggttcatcaccctctacaacgtgctgtacaccagcctgcccgtgctcctcatggggctgctcgaccaggatgtgagtgacaaactgagcctccgattccctgggttatacatagtgggacaaagagacttactattcaactataagagattctttgtaagcttgttgcatggggtcctaacatcgatgatcctcttcttcatacctcttggagcttatctgcaaaccgtagggcaggatggagaggcaccttccgactaccagtcttttgccgtcaccattgcctctgctcttgtaataacagtcaatttccagattggcttggatacttcttattggacttttgtgaatgctttttcaatttttggaagcattgcactttattttggcatcatgtttgactttcatagtgctggaatacatgttctctttccatctgcatttcaatttacaggcacagcttcaaacgctctgagacagccatacatttggttaactatcatcctgactgttgctgtgtgcttactacccgtcgttgccattcgattcctgtcaatgaccatctggccatcagaaagtgataagatccagaagcatcgcaagcggttgaaggcggaggagcagtggcagcgacggcagcaggtgttccgccggggcgtgtcaacgcggcgctcggcctacgccttctcgcaccagcggggctacgcggacctcatctcctccgggcgcagcatccgcaagaagcgctcgccgcttgatgccatcgtggcggatggcaccgcggagtacaggcgcaccggggacagctgatcccttacccccaggctgggatgcggccacaaagcacgtctatttttttatgaaagactctcaggactttgtgtgtgtgtgtgaattgcattcatcacaaagatattgaagacaataaataatctttataacaaaaaaaaaaaaaaaaaaaaaaaaaaaaaaaaaaaaaa

SEQ ID NO: 171 - DNA, 1807 bp, Homo sapiens
atttttgctggagcctgcgaccgagtgggagtggagtggagcgactgtggttgccgactctttcctcttccccacggtccagtcagcgggttaattaggccatcggccctcgagccgagacttgtctcttatctagttctggggagcgcctcgtcaacatgagtgatgtggaggaaaacaacttcgagggcagagagtctcgctctcagtcaaaatctccaacgggaactcctgctcgtgtaaaatcggagagcaggtcaggatctcgtagtccatcaagggtttccaaacactctgaatcccattctcgatcaagatcaaaatccaggtcgaggtcaaggagacattctcatagacgttacactcgatccagatcccactctcactctcataggagacgatctcgaagtagatcatatacaccagaataccggcggcgaaggagccgaagccattctccaatgtctaaccggagaagacatactggcagcagggcaaatccagatcccaacacttgccttggagtgtttggcctcagtttgtacacaacagagagggatcttcgtgaagtattttctcgatatggaccattgagtggtgtcaatgtggtttatgatcagcgaactgggcgatctcgaggatttgcttttgtgtattttgagagaatagatgactcaaaggaggctatggaaagggcaaatggaatggagctggatggtagaagaattcgggtggattattctataaccaagagagcgcacacaccaacaccaggcatctacatgggcagaccaactcatagtggtgggggtggtggaggaggcggcggcggtggaggtggaggtggtggcagacgtcgagattcttactatgatagaggatatgatcgtgggtatgacagatatgaagactatgattaccgatacagaagacgatcaccttctccttattatagtcgatatagatcacgatcaagatctcgttcctacagcccaagacgctattgataacggaatggttgcaattaaggacattttttttcctctttttttttttttttttttttaattctgagatttccccaagctgtggattgttcctactccttaagaaaaaaactttggtttatttagcatctacacttttgtcagttgtgttgctgttttccacccattttattatactcttaaaagatgtaattgttgtcattttgaacagttaaacatcttgagtataaaaagaaccccaatgttatgttatgctttgtaaattttttttttgcttttacctagataaacttctagctaatcaaataaggaaagaaactgtctttttaaagcttcttttgtgttagatactgtattagagatctgcatttatcatgagttcctttttttttttaactttatttttgggaaagtaacacatgaagtagttcagtcatgtcaggtttgtctggggtggaatggaacagtcaggtagttgaaagtttttttttagagatgaaaagcttgtgaactcctgtaaaacatgctgtatttgaaatacatctgttaaaacttaaaaactaaagtgtgattttttttgttgttgttaagtttattgaagtttattcccttaatcagtgaaggacaacccttatttattacctagagcagttgtataattcgctgttagaaattttggtattgggacagtggataagcaggttatcacatagcatagaattcttaaaagatacatgtggggaaaagtagtctcaaataaaagctaatttctttgaaaaaaaaaaaaaaaaaaaaaaaaa

SEQ ID NO: 172 - DNA, 3522 bp, Homo sapiens
acgcttgcgcggcgagtagaacgtgtggcggcggcggagatcgcgtctctttcgctccgtgtcccgctgctgctcctgtgagcgcccggcgagtccgtcccgtccaccgtccgcagctggtagccagcctgcccctcgcctcgactccctttcaccaacaccgacacccacattgacacctccagtccggccagccgctccactcgttgcctttgcatctccacacatggcgtcctccgcgcagagcggcggctcctccgggggacccgcggtccccaccgtgcagcggggcatcatcaagatggtcctctcagggtgcgccatcattgtccgaggtcagcctcgtggtgggcctcctcctgagcggcagatcaacctcagcaacattcgtgctggaaatcttgctcgccgggcagccgccacacaacctgatgcaaaggatacccctgatgagccctgggcatttccagctcgagagttccttcgaaagaagctgattgggaaggaagtctgtttcacgatagaaaacaagactccccaggggcgagagtatggcatgatctaccttggaaaagataccaatggggaaaacattgcagaatcactggttgcagagggcttagccacccggagagaaggcatgagagctaataatcctgagcagaaccggctttcagaatgtgaagaacaagcaaaggcagccaagaaagggatgtggagtgaggggaacggttcacatactatccgggatctcaagtataccattgaaaacccaaggcactttgtggactcacaccaccagaagcctgttaatgctatcatcgagcatgtgcgggacggcagtgtggtcagggccctgctcctcccagattactacctggttacagtcatgctgtcaggcatcaagtgcccaacttttcgacgggaagcagatggcagtgaaactccagagccttttgctgcagaagccaaatttttcactgagtcgcgactgcttcagagagatgttcagatcattctggagagctgccacaaccagaacattctgggtaccatccttcatccaaatggcaacatcacagagctcctcctgaaggaaggtttcgcacgctgtgtggactggtcgattgcagtttacacccggggcgcagaaaagctgagggcggcagagaggtttgccaaagagcgcaggctgagaatatggagagactatgtggctcccacagctaatttggaccaaaaggacaagcagtttgttgccaaggtgatgcaggttctgaatgctgatgccattgttgtgaagctgaactcaggcgattacaagacgattcacctgtccagcatccgaccaccgaggctggagggggagaacacccaggataagaacaagaaactgcgtcccctgtatgacattccttacatgtttgaggcccgggaatttcttcgaaaaaagcttattgggaagaaggtcaatgtgacggtggactacattagaccagccagcccagccacagagacagtgcctgccttttcagagcgtacctgtgccactgtcaccattggaggaataaacattgctgaggctcttgtcagcaaaggtctagccacagtgatcagataccggcaggatgatgaccagagatcatcacactacgatgaactgcttgctgcagaggccagagctattaagaatggcaaaggattgcatagcaagaaggaagtgcctatccaccgtgttgcagatatatctggggatacccaaaaagcaaagcagttcctgccttttcttcagcgggcaggtcgttctgaagctgtggtggaatacgtcttcagtggttctcgtctcaaactctatttgccaaaggaaacttgccttatcaccttcttgcttgcaggcattgaatgccccagaggagcccgaaacctcccaggcttggtgcaggaaggagagcccttcagcgaggaagctacacttttcaccaaggaactggtgctgcagcgagaggtggaggtggaggtggagagcatggacaaggccggcaactttatcggctggctgcacatcgacggtgccaacctgtccgtcctgctggtggagcacgcgctctccaaggtccacttcaccgccgaacgcagctcctactacaagtccctgctgtctgccgaggaggccgcaaagcagaagaaagagaaggtctgggcccactatgaggagcagcccgtggaggaggtgatgccagtgctggaggagaaggagcgatctgctagctacaagcccgtgtttgtgactgagatcactgatgacctgcacttctacgtgcaggatgtggagaccggcacccagttggagaagctgatggagaacatgcgcaatgacattgccagtcacccccctgtagagggctcctatgccccccgcaggggagagttctgcattgccaaatttgtagatggagaatggtaccgtgcccgagtagagaaagtcgagtctcctgccaaaatacatgtcttctacattgactacggcaacagagaggtcctgccatccacccgcctgggtaccctatcacctgccttcagcactcgggtgctgccagctcaagccacggagtatgccttcgccttcatccaggtgccccaagatgatgatgcccgcacggacgccgtggacagcgtagttcgggatatccagaacactcagtgcctgctcaacgtggaacacctgagtgccggctgcccccatgtcaccctgcagtttgcagattccaagggcgatgtggggctgggcttggtgaaggaagggctggtcatggtggaggtgcgcaaggagaaacagttccagaaagtgatcacagaatacctgaatgcccaagagtcagccaagagcgccaggctgaacctgtggcgctatggagactttcgagctgatgatgcagacgaatttggctacagccgctaaggaggggatcgggtttggcccccagccccgctcacgccagtccctcttcctctgccgggagggtgttttcaactccaaaccccagagaggggttgtagattgggtccagctttgcttcagtgtgtggaaatgtctcgtggggtggcatcggggctgcggggtggggaccccaaggctttctggggcagacccttgtcctctgggatgatgggcactgctatccacagtctctgccagttggttttatttggaggtttgtgggctttttttaaaaaaaaaaagtcctcaaatcaggaagaaacatcaaagactatgtcctagtggagggagtaatcctaacacccaggctggccgccagctggcacctgcctctatcccagactgccctcgtcccagctctctgtccaactgttgattatgtgatttttctgatacgtccattctcaaatgccagtgtgttcacatcttcgctctggccagcccattctgtatttaaagcttttgaggcccaataaaatagtacgtgctgtctgcagcccttattgatcaaaaaaaaaaaaaaa

SEQ ID NO: 173 - DNA, 13470 bp, Homo sapiens
acagccgctgccgctggcgccgctcctcctccgtgtcagttgttgggctgtaatggcgactgggccgcccctgacgaagtgactcccgggccggggagcggggccagacctgcgccagagagaactgcagggagccgcagctcggggggtggcttgccctgagggaggggaggcagcctttccgccttgtcttccttcccagcggaccggcggatccccggagccggtgcgaggagggcacccggtgcgtccccggagcggggaggccaggccgggcagccctggggccggtcggggcggcgtcactgcaccctccgccaggctccgcgggatgcaccgtggtagccgagggcggaggcgacactctcaggtaaattggcaggatgaggagcagcaaatcaaaagaggtgcctttaccaaatccaaggaactctcaaagcaaggatactgttcaagatataaccacatcgtgggatgcactttctcaaaccaaggctgctctgagacacattgaaaataaattagaagtagcccctacaagtacagctgtgtgtgattctgtcatggataccaagaagtcttctacaagtgctactcgaaaaataagtagaaaagatggtagatacctggatgattcttgggttaatgctccaatctccaaatccactaaatcacgaaaagagaaatctcgtagtcctctcagggccaccaccctggagagtaatgtgaagaaaaataatcgtgtggaatttcgtgaacctttggtttcttatagggaaatccatggtgcaccttccaatttcagttccagccatctggaatcaaagcacgtatactgtgtagatgttaatgaagaaaagactgagagcggtaactggatgataggcagtcgagaagaacggaatatacggagctgtgattttgagagctcccaatcatctgtcatcaatgatacagttgttaggtttttaaatgatcgaccagcaattgatgcattgcaaaattctgaatgtttgattaggatgggagcttctatgagaactgaggaagaaatgcctaacagaacaaaaggaagtgagaataatttgaagctttctgtgaataacatggcccatgatactgatccaaaagcgttacgactaactgactcttctccatcctctactagtacttctaattcccaaagattagatattctaaagcggcgacaacatgatgtcaaactggaaaaacttaaggaacggattagaaaacagtgggaacactcagaagaaacaaatggccggggccagaagctgggtcatattgaccatccagtaatggttgttaatgttgataactcagtaacagcaaaagtcagaaaagtggcaacagcaccacctgctccagcatataaaggtttcaacccttcagagaccaagattcgaacacctgatgggaaagtgtggcaggaggctgagtttcaaaacatgagtagagaactgtatcgagatttagcacttcactttgcagatgatatttctataaaggagaaacctgctgaaaaaagtaaagagaagaaagtagtcaagccagtacgaaaagtccaaaaagtagcacagttatcaagtacagaatgcagaacaggtagtagtcatcttataagtacatcttcttggcgagatggacaaaaattagtaaagaagattctgggacctgctcccagaatggagccaaaagagcaaagaacagcatcaagtgacagaggtggaagagaaagaactgctaaatctgggggtcacattggaagagcagaatctgatcccaggttggacgttttacatagacatcttcaaagaaactcagaacgttcgagaagtaaatctcggtctgaaaataatataaagaaactagcttcatctcttccagataataagcaggaggaaaatactgccttaaataaggactttttacctattgaaattcgtggcattcttgatgacctacagctggattctacagctcacactgcaaagcaagatactgtagagttacagaaccagaagtcatcagcaccagtacatgctcctaggagtcacagcccagtaaaaagaaaacctgacaaaataacagctaatgaagatccccctgttatttccaaaaggcgccactatgacacagatgaggtacgacagtacattgttaggcagcaggaggaaaggaagagaaagcaaaatgaagagaagaaggctcaaaaggaggctacagaacagaaaaacaaacgattacaagagctctaccggaagcagaaggaagcctttactaaagtaaaaaatgtccctccttctgagccatcagcaactaggcgactacaggaaacttactccaaattgctactagaaaagaccttgcttgaagagccatctcatcaacatgttacgcaggaaacacaggccaaaccagggtatcagccatctggagaatctgacaaagaaaacaaagtacaggaacgtcccccaagtgcatcttccagtagtgacatgtctctctcagaacctccacagcctcttgcaagaaaagacttgatggaatctacatggatgcagcctgaaagattgagcccacaagttcaccattctcaaccacagccttttgctggaacagctggaagtttactctcccatctcttgagtttagagcatgtaggaattttgcataaggattttgaatctattttaccaaccaggaagaatcataatatggcttcaaggccattaacttttacacctcaaccatatgtgacctcaccagctgcttatacagatgccttgttaaaacctagtgccagccaatataagagtaaactggatcgtattgaagccttgaaagcaacagctgcttctttgtccagcagaattgaaagtgaagccaagaaattagctggggccagcattaactatgggtcagcatggaacactgagtatgatgtgcagcaggcacctcaagaagatggaccttggaccaaggctgtaactccacctgtgaaagatgataatgaagatgttttctctgccagaattcagaagatgctgggaagctgtgtatctcatgcaacttttgatgatgatcttcctggtgtaggcaatcttagtgaatttaaaaagcttcctgagatgataagaccacagagtgccatatcaagctttagagtgagatcccctggtcccaaaccagaagggctactggcacagttatgtaaaaggcagactgactcttctagctctgatatgcaagcctgttctcaagacaaagccaaaatatctcttggttccagcatagattcagtcagtgaagggcctcttcttagtgaggggagtctctctgaagaagagggagaccaggatggacagccccttttgaaagtagcagaaattttaaaagaaaaggaattttgtcctggagaaagaaatagttatgaacccatcaaagagtttcagaaagaagctgaaaaattcttgccactttttgggcacataggtggtacacaaagcaaaggaccatgggaagaattggcaaagggaagtccacatagcgtcattaatatttttacaaaatcctatcagttatatggaaaagggtttgaagacaagttggacagaggaacatcaacatcacggcctttgaatgccaccgcaactcctctaagtggtgtttcatatgaagatgattttgtctcctctccagggactgggacttcgacagaaaaaaaatcaactcttgaacctcatagcactttaagccctcaggaggaccattctaacagaaagtctgcctatgatccttcctctgtggatgttacctcccagcattcatcaggagcccagtctgctgcatcgtctcgttcatctacttcttctaaaggaaagaaaggaaaaaaggaaaagacagaatggttggattcattcactggaaatgttcagaactcacttcttgatgaggaaaaagcagaacgtggctcccatcaaggaaagaaatctgggaccagcagcaaactttctgttaaagattttgagcagactcttgatacagatagcactttggaggatctttctggacattctgtgagtgtctcatcagataagggaagatctcagaaaactccaacttctcccctgtcaccaagttcccagaaatcattgcagtttgacgttgcaggaacttcttcagaaagatctaagtcgtcagtaatgcctccaactataacaggatttaagcctaatgcacctctcactgatctgaacccggcagccagcagaacaacgacagagaacatggctccaataccaggttctaagcgcttttctcctgctggcctccatcatcgtatggcagcagaactcagttatctgaacgccattgaggagtcggtgcgccaactgtcagatgtagaaagagttagaggcatttcacttgctcagcaggagagtgtgtctctagctcagataataaaggcacaacagcaacgccatgaaagagacttggccctcttgaaactaaaggctgaacaagaggctctggagagtcagagacaattagaagaaacccgaaacaaagcagctcaggtccatgcagaatcattacagcaggtggttcaatcacaacgggaagtaactgaagtcctgcaggaagcaacgtgtaaaatagcagctcagcagtcagaaactgctcgcctcaccacagacgcagcacgtcaaatctgtgagatggcagagttgactagaactcatatctcagatgctgtcgtggcttcaggagctccccttgcaatactgtatgaccaccaacggcagcaccttccagactttgtgaaacagctgaggaccagaactgaaacagataggaaaagtccatctgtttcactctctcagagtaaagaagggacccttgactcaaagcatcagaagtattctgcttcatatgatagttattctgagtcttcaggatacaagaatcatgatagaagaagtagcagtggtagcagccgccaagaaagtccttcagttccatcttgtaaggaaaatgagaagaaacttaatggtgaaaagatagagagttccattgatgaacaggttcagactgctgcagatgattctctacgaagtgatagtgttccatctcttcctgatgaaaaagactcaacgtctattgcaacagaatattctctgaaatttgatgaatccatgacagaagatgaaatagaagaacaatcatttcgatcattactaccttcagagagtcaccgcagatttaacatggaaaagagaagaggtcatcatgatgactctgatgaagaagcttctccagaaaaaactacactgtctactgccaaggaactgaacatgccattctcaggaggacaagatagcttttctaaatttactatggagatggttcgacagtatatgaaagaggaagaaatgagggcagctcaccagtcttcactcctgcgtctccgtgaaaaggccttgaaggagaagactaaggctgaattggcctggttagagcatcaaaaaaaacatctacgagacaaaggagaggatgataaaatgcccccgctccggaagaaacagcgtggtttgcttttaaggttgcagcaagaaaaggcagaaataaaacgtcttcaagaagccaataaggcagctcggaaggaaagacagctgattcttaaacagcaggaggagatagaaaagatccgacagaccaccataaaactacaggagaaattgaagtctgcaggggagagtaaattggactctcatagtgatgatgatacaaaggataataaggcaaccagtcctggtccaactgacttggagacccgcagtccttctcccatttcaatctccagcagtgaaactagcagcattatgcagaaactgaagaaaatgagaagccgcatggatgaaaagtttctgacaaagcgggagcaaaaattaatgcaacggcgacaacatgcagaggagctcctagagtggaagcgacgtttagatgcagaagaagcagaaattcgtcaaatggaaaaacaagctttggctgcctgggacaaagaattaataaaacccaaaactcctaagaaagaactggaggaccagagaacagaacagaaagaaatagcaagtgaagaggaatctccagtacctctgtactctcatctaaacagtgaaagctccattccagaagaattaggcagccctgctgttgaatatgtaccatccgagtctataggacaggagcagccagggagtccagatcacagtatacttactgaagaaatgatttgttcacaggaactagaatcttctacctctcctagtaaacattcacttcccaaaagctgcacatctgtgtcaaagcaggagtctagcaaaggaagtcataggactggaggacaatgtcacctgcctatcaagtcccatcagcactgttatagttggtcagatgagtcattatctatgacacagtcagaaactacatctgaccagagtgatattgaaggtaggatcagagctctgaaggatgagttgcggaaaagaaaatcagttgtgaaccagctgaagaaggaacagaaaaaaaggcaaaaggaaagactgaaagcccaagaagccagtctgatcaagcagttagagtcatatgatgaatttattaagaaaactgaagccgagcttagccaagatttggaaacatcaccaacagccaagcctcagattaaaacgctctcctcagcttctgaaaaacccaagatcaaacccctcacaccactacacagatctgaaacggcaaagaattggaaatcactaacagagtcagaacgttccagaggatccctggagtctattgctgaacatgttgatgcttcactgtctggttctgagagatcagtatcagaaaggtctttatctgcatatgcaaagagagtaaatgaatgggacagtcgaacagaagattttcagaccccatctccagttctcagatcatcaaggaaaatcagagaagaatctggagattctctagaaaatgtacctgcattacatcttctcaaagaattaaatgccactagtagaattcttgatatgtcagatggcaaggttggagaatctagtaaaaaatcagaaataaaagaaatagagtatacaaaattgaagaagagtaagattgaagatgccttttctaaagaaggtaaatctgatgtcttactgaaattagtcctagaacagggagattcatctgaaattctttcaaagaaagatcttcctttagattctgaaaatgttcagaaagacctagttggattagctattgaaaatctccataaaagtgaggaaatgttgaaagagagacagtcagatcaagatatgaatcatagtccaaacatccaatcaggaaaagacattcacgaacaaaagaacacaaaggaaaaagatttgtcttggtcagaacatctttttgctcctaaagagataccatactctgaagattttgaagtgtcttctttcaagaaagaaatttcagctgaattgtacaaagatgattttgaggtgtcatctttgctgtcactcaggaaagactctcagtcttgcagagataagccacagccaatgaggagctctacaagtggagccactagctttggtagtaatgaggaaatcagtgagtgcctaagtgagaaaagcctttctatccatagcaatgttcattctgacaggctgttggaactcaagtcccctactgagctgatgaaaagtaaggagcgcagtgatgtggagcatgaacagcaagttactgaatccccttccttggcttcagttcctactgcagacgagttatttgatttccacattggtgatagggtgttgattggaaatgttcagccaggaattcttcgattcaaaggtgagactagttttgctaaaggattttgggccggagtggagttagataaacctgaaggaaataacaatggaacatatgatggtattgcatattttgagtgcaaagaaaagcatggtatttttgctcctcctcaaaaaatatctcacattccagaaaactttgatgactatgtagacattaatgaagatgaagactgttactcagatgaacgatatcagtgctataatcaagagcaaaatgatacagagggtccaaaagacagagaaaaggatgtcagtgaatatttttatgagaaatccctacctagtgtgaatgatatagaagcctcagttaatagaagtagaagccttaaaatagaaacagacaatgtacaggacatttctggggtacttgaagcccatgttcaccagcagtcttcagtggattcacagatttcttcaaaggaaaacaaagacctcatttctgatgccacagaaaaggtttccatcgctgcagaagatgacactttagacaataccttttccgaagaattggagaagcaacagcagtttacagaagaggaagacaacctatatgctgaagcttcagaaaagctttgtacaccacttctggatcttttaacaagagaaaaaaaccaactggaagcccagctgaagtcatcactaaatgaggaaaaaaagtcaaaacaacaactggaaaaaatcagcttactgacagacagtttactaaaagtctttgtaaaggacacagtcaatcaactacaacaaatcaaaaaaaccagggatgagaaaatccagcttagcaatcaggagcttcttggtgatgaccaaaagaaagtaacaccccaagacctatcccaaaatgttgaggaacagtcgccaagtatttcaggttgcttcttaagttctgaattggaagatgaaaaagaagagatttcctctccagatatgtgtcccagaccggagagcccagtatttggtgccagtgggcaggaagaacttgctaagagacttgctgaacttgaactcagccgggagttcctgagcgcgttaggagatgatcaagactggtttgatgaagactttggtttgagctcttctcacaagatccaaaaaaataaggcagaagaaaccattgtacctctaatggcagaacctaaaagagtaacccaacaaccatgtgaaacattattggcagtcccccatactgcagaagaagtagagattcttgtacataatgcagcagaagaactttggaaatggaaagaattaggccacgatcttcatagcatcagtattcctacaaaactgcttggctgtgccagtaaaggtctagatatagaaagcactagtaaaagggtctacaaacaggcggtttttgatttaacaaaagagatttttgaggaaatatttgctgaggatcccaacttaaatcaacctgtctggatgaagccatgtagaatcaactctagttatttccgacgagtgaaaaatccaaataaccttgatgaaatcaagagcttcatagcaagtgaagtactcaagttgttcagtcttaaaaaggagccaaaccacaaaacagattggcagaaaatgatgaaatttggaagaaagaaaagagaccgagtggatcatatcctggttcaggagctccatgaggaggaggcacagtgggtgaactatgatgaggatgagttgtgtgtgaaaatgcagctagccgacgggatctttgagaccctgatcaaagatactattgatgttctgaatcagatcagtgaaaagcaggggagaatgctacttgtgtgacatcttgcaaataaatcgaacgctgagtgctaatgtgagtcctgggcctttctgcctcctgatgtacacccatcgccatcatagcaagagtgcttctggaccttgtacttattcttaaagactaccagtatggagttcataggacaatgtggtacacctggtattacagcctttgcctttcgagactatccactggattaatgggttattttcagtgggcagggttgcacagtgtaatcctacaccttttgctaacacccctactaggtcccagagggccagaaacacctgacttacctctgagtttagactagggtatcacttctttgagtctgaagtcaagtgagagaggtatagataaatgcatcacatcacttttgaaatgtaattctggtctataccatggaagtcataaatggacattatagtctctaaacagtattaaacccttaaccacttctaaaataggcaagctcaataatgtctgccaacttcacattctggagtttatttcatttctttttgaagaccattttcttccattattgtagttgagcagcaccaagtggactgtcaggctaacaggaataagtggtagccttgctttctgagcaccatctaaagaattttaaacctctgcattatgtttagtgttctctgtgtgggcatgaaaacaaagaaatgcccctactgaagactgggctcaaaggaccaatgcagggctggttcttttaccccttggtttactcctgcacttgtcttactcattctgaatctctaccagctgctcccagaatcacagatactcaggaccatctcaggcatccaggcatggcaaagtggaaataattcattttggcctgcaaaccttcaactcccatctttccccaagaagtcagagatgctgttacttgaatgatttaggaaatgagtgtgtgcaccaaagacaaaaagatattgtctattgtttgtgtgcttgttttgcgctatggaacattttttaatttattttaagataaattattaagttgaaaatgtgtgtccctattcagaagtgaaagattcatcttgtaatagttaaacctccatcttgaagcttctatggttcatagtctttgcacaggaacctgtggttttaacaaaccaatacacatattgaagaagtcattttaattcagtgaaacgaagatgggcttttccagatcacctgcaatagcagcagtgggataaaatgatttaaaaacactgtacaatttaactctgcctctcttgcagcattgcttctcacaactattacctgcatctgaaaaaaaatctatagactccagctgctacattagagcataagagatgctctcctgggacctcagtaccctgccttcttgactggtttccgttcatcagtcctgtccctcttcaagtaatctagaagaatgtggatactcttaggcgtgaatgtaaatgccttaatattgaaggtcctggttagaagcatgatacaagacatctactggattcatatttacaaatatcctggaatgttatagcttcaaagtatattagaaaaaccccaaagatggtataatctttaagtgtgcacgttcgtttatttctgcatcttccctccaaacttgcctttgcatcttaaatatttcactatgcacactcccattcctcttgggtttcatcttgtcgtttaagaaatgtactgaaataatcattggaatatttgcattttgcacaatgactggtatgatagctcttgacaaataaggaaagcactgaaatgttgtgattgggtctcgggaaatgctcagattgatgtcttaccagcatttcttctgggcttgtgatgttgagctgtagtcttgtagccataatgagcaaattgactaagagaagcaaaggtttcttggggttattaaccagtagtgtggaaatactagttttatgtggccaaggaaaagcaaaggcttttcttttcagtttgtgttatttggaagacagaaaaacatcttgtctacatcctttggctgtttgtaggatcacgttgtccttacgatactgaaactttacagctgctgtaaattttttataaatgaatttcaaaatgttataatgggactgtaggttgtttttctacatcttcattatttggacctaaaaccagtttttaataagaaagtttatctttactctttctgaaattatgactccagaaaaagaaaaaaaaaatacaagtcatggaatcagcaatctggtaagaaatgctgccaagaatgtggcagtagctgtcctgacagactccaactgtctttactatctgaagaatcctaggctccacatgagaggcagaaatggatcagtcttattcttttctagaaatggttatctgtagtttggtagcaaaaaaaaagaaaaaagaatccataattagcagatttcttattaactatttggatctaattgaaatggctttattcttaggattaagaaagatagatgtggatacccagccactcgttccatattggtatctttttaaatcagctctgcctcttaatcaagaacctaaatattccctctttctaatctttgttccttctccctacaccctcatcctctttcactcttccttcataattcctctaagaaaaatatctttgcatcagcagtaatatcttttagaatagcactatcagaatttagcagtaaaccaacatacaggcttcagatttacttctgagtccaaaacaatttgtgctatccagggtagttaactctgggttaaacaagtacagggtatagattccctcttcaggtctacacaggaatttttaccatagggaaaagtggggagagctcaaacgtagttaataaggaaggtaatttgtttttcttttacctaaaagaaaagaaaattccttctgtgactacaggtctctgagaaattatctttcaaaagagatttcattgctcataagagtgttgtggcctattgataaaaacaattttgttcagtttcttgtcttgaaaaaaaagtggccttagctttttgcaatacttgaataaagtgtgtactcgcaaaagaatttctgtagcacagcattagagactcataacttttctgcaagaaatacaaacttacatcttccttttactaccttaagaatactagtgaataaaacattaattcaaagagcaaattatagaaactacaatgacatttaatgcaaattgtaggaatttacatgtttacaaatcatcttcaactggttgtgcagcaattcaataaaatatctttgtattataaaaatgtgaagaaaaaatgtaaactgatgtaaaggaggtactgtcattttaattaacctatgtttaatagcttttccttctggactttgcaaagccttcttggcaaacacattgcaaagcattctctgggaggttcagcctccttgtgtgtactgtactgtgcagacatgaaaaaataaacccgtttactgtgtgcgtgtaaatagcctggtcatcaggccattttcagccaatagtcacatccagtgcaattttgcaccgaacacttaagggtgtggtttgtaagtacgatctgtaaaataactgggatgaattcccatgtatacctgtgtaaatagatttgttaactgaaatatactttaagaaagataaaatctgtaaataaactgatttataaattaatttcaaaaaaaaaaaaaaaaaa

SEQ ID NO: 174 - DNA, 2937 bp, Homo sapiens
caatttcagagtgggatatcagatctttagtgtgaagatacatctacattaaaccaggaatcactagaactgacatttggacaagaaaatttggaaaattttaaaactgtgaaggttgatcatggaaattaaagaggaaggggcatcagaagaagggcagcactttcttcctacagcccaggccaatgatcccggggactgtcagttcacaagtatccagaagactccaaatgaaccgcagttggaattcatccttgcatgcaaggatctcgtggctcctgtccgtgatcgtaaactgaatacactggtgcagatctccgtaatccaccccgtggagcagagtctgacaagatactccagcaccgaaattgtggagggaacaagggacccactgtttttgactggtgtcacattcccatctgagtatcccatctatgaggagaccaaaataaaactaacagtctatgatgtcaaggataagtctcatgacaccgttcgaaccagtgtcctaccagaacataaggatcccccgccagaagttggccgaagtttcttgggctatgccagttttaaagtgggagagctgctgaagtcaaaggagcaattgctggtcctgagcctgagaacttcagatggtggcaaagtggttggcaccatagaagtcagtgtcgtgaagatgggggagattgaggatggggaagccgaccacatcaccacagatgtacagggacaaaagtgtgccctggtatgtgaatgtacagccccggaaagtgtgagcggaaaagataacttaccttttttgaattcagtgttaaagaacccagtatgtaaattatatagatttcccacatctgacaataagtggatgcgaattcgagagcagatgtcagagagcattctttcctttcatattcctaaggaattgatttcccttcacattaaagaagatttgtgcagaaaccaggagataaaagaacttggtgagctttctccacattgggacaatctgcgaaaaaatgtccttacgcactgtgatcaaatggtgaatatgttccaagacattctgacagaacttgccaaggaaacagggtcctctttcaaatcaagcagcagcaaaggagagaaaacattagaatttgttccaataaatctacatctgcaaagaatgcaggtacacagccctcacttgaaagatgctctctacgatgtcatcactgtgggagccccagctgcccattttcagggatttaagaatggtggtcttcggaagctactccatagatttgaaacagaaagaagaaataccggataccagtttatttactattcacctgaaaacacagccaaagcaaaggaagttctcagcaacatcaatcaactacaacctcttatagcaacccatgcagacctactgcttaattctgcaagccagcattctccagacagcttgaagaattctttaaagatgctttcagaaaaaacagagctttttgtacatgccttcaaggatcaacttgtcaggagtgctcttttagcactctacactgcaaggccaggaggcattcttaagaagccaccctctcctaagagcagcacagaggagagcagtccccaagaccaacccccagtgatgagagggcaggactccataccacatcattcagactatgatgaggaagagtgggacagggtgtgggccaatgtggggaagagcctgaactgcattattgctatggtggacaaactgattgaaagagatggtggcagtgaaggcagtggtggcaacaatgatggagaaaaggaaccttcattaacagatgccattccctctcacccaagagaggactggtatgaacagttgtatcccctcatccttaccctgaaggactgcatgggagaagtggtgaaccgagccaagcagtccctgacatttgtgctccttcaggaacttgcgtacagcttgccccagtgtctgatgctgacgctaagaagagacatcgtcttcagccaagcacttgctggattggtttgtggttttatcatcaaattacagacaagtctgtatgacccaggcttcctacagcagcttcacacagtggggttgatagtacaatatgaaggattgttaagtacatacagcgatgaaattggaatgttagaggacatgcccgttggcatttccgatttaaagaaagttgcatttaaaataattgaagccaaatccaatgatgtattgccagttataacaggaagacgagaacattacgtggtagaggtcaagcttccagccagaatgtttgagtcactacctctacagattaaagaaggacagttgcttcatgtgtatccagtactttttaatgttggaatcaatgaacagcaaactctggctgaaaggtttggagatgtctctttgcaagaaagtattaatcaggaaaacttcgaacttctacaagaatattacaagatatttatggaaaagatgcctcctgattatatttcacattttcaggaacaaaatgatttaaaagcattgctagaaaatctccttcaaaatatccaatccaaaaaaagaaagaatgtagaaattatgtggctggctgcaacgatttgccgcaaactgaatggtattcgtttcacctgttgtaaaagtgccaaagacaggacatcgatgtcagtgacacttgaacaatgctcaatcttgagagatgagcaccagttacacaaggacttctttatccgagcgctggattgcatgagaagagaaggatgccgcatagagaatgtactgaagaatatcaaatgcagaaagtatgctttcaacatgctacagctgatggctttccccaagtactacagacctccagaggggacttatggaaaagctgacacctaagtttaccaacatgttaataaacaggaacacaaatacatttc

SEQ ID NO: 175 - DNA, 3280 bp, Homo sapiens
aacacaaacacaaacacgaacacgaacacgctcagcgtccccggggagggcggactgaagccacctcaccattcatcgcccctggaccccgcagtccccctcggactcagggccagagccttctgcgaagcaacctagccccagggaaacggtagcggccgcagaagccccgctctctgtaacggccgcggaggagcagcaagcctccctgtgagtcggtgggagacaagacggagcggcggtaagggcggtagggaagtgaagcgcctctctccaccttgttagaagcgcgctgaaagcggcctgcctacccaccccatcgctgccgttttgcagtcgtcgctcccaccttccgctgccgcctggagggaagccggagcgacgggggtcacggcggcggtcagagggtaaaggtcttgctcccagcagcctccgcggtggatacgtcgccatcttggatccgcgggacaagaaaattcatgcgagggagacgtggtgggcggtccttcctgtgacacgacccttgagtgacagttctatttgattgcctccggtactgtgaggaaaggacacgactctatggtgaggactgatggacatacattatctgagaaaagaaactaccaggtgacaaacagcatgtttggtgcttcaagaaagaagtttgtagagggggtcgacagtgactaccatgacgaaaacatgtactacagccagtcttctatgtttccacatcggtcagaaaaagatatgctggcatcaccatctacatcaggtcagctgtctcagtttggggcaagtttatacgggcaacaaagtgcactaggccttccaatgagggggatgagcaacaatacccctcagttaaatcgcagcttatcacaaggcactcagttaccgagccacgtcacgccaacaacaggggtaccaacaatgtcacttcacacgcctccatctccaagcaggggtattttgcctatgaatcctaggaatatgatgaaccactcccaggttggtcagggcattggaattcctagcaggacaaatagcatgagcagttcagggttaggtagccccaacagaagctcgccaagcataatatgtatgccaaagcagcagccttctcgacagccttttactgtgaacagtatgtctggatttggaatgaacaggaatcaggcatttggaatgaataactccttatcaagtaacatttttaatggaacagacggaagtgaaaatgtgacaggattggacctttcagatttcccagcattagcagaccgaaacaggagggaaggaagtggtaacccaactccattaataaaccccttggctggaagagctccttatgttggaatggtaacaaaaccagcaaatgaacaatcccaggacttctcaatacacaatgaagattttccagcattaccaggctccagctataaagatccaacatcaagtaatgatgacagtaaatctaatttgaatacatctggcaagacaacttcaagtacagatggacccaaattccctggagataaaagttcaacaacacaaaataataaccagcagaaaaaagggatccaggtgttacctgatggtcgggttactaacattcctcaagggatggtgacggaccaatttggaatgattggcctgttaacatttatcagggcagcagagacagacccaggaatggtacatcttgcattaggaagtgacttaacaacattaggcctcaatctgaactctcctgaaaatctctaccccaaatttgcgtcaccctgggcatcttcaccttgtcgacctcaagacatagacttccatgttccatctgagtacttaacgaacattcacattagggataagctggctgcaataaaacttggccgatatggtgaagaccttctcttctatctctattacatgaatggaggagacgtattacaacttttagctgcagtggagctttttaaccgtgattggagataccacaaagaagaacgagtatggattaccagggcaccaggcatggagccaacaatgaaaaccaatacctatgagaggggaacatattacttctttgactgtcttaactggaggaaagtagctaaggagttccatctggaatatgacaaattagaagaacggcctcacctgccatccaccttcaactacaaccctgctcagcaagccttctaaaaaaaaaaaaaaaaaaaaaaaaagacttcccttttcttggggtatggctgtctcagcacaatactcaacataactgcagaactgatgtggctcaggcaccctggttttaattccttgaggatctggcaattggcttacgcaaaaggtcaccatttgaggtcctgccttactaattatgtgctgcccaacaactaaatttgtaatttgtttttctctagtttgagcagggtctgaattttttcatttatttccttttttgccagcagacagacttgagtctgtaaagacaagcaaatacactgacagaagtttaccatagtttctaaaatgtaaaaaagaaaacccccaaaagactcaagaaaattagaccacaaattttgcattgttcattgtagcactattggtaataaaataacaaatgtttgtgcatttttatgtgaagatccttctcgtatttcatttggaaagatgagcaagaggtctgcttccttcattttacttccccttctgtttttgaaaggcagtttcgccaagcttaatgcaagaatatctgactgtttagaagaaagatattgccacaatctctggatggttttccagggttgtgttattactgagcttcatctttccagaatgagcaaaacactgtccagtctttgttacgattttgtaataaatgtgtacattttttttaaatttttggacatcacatgaataaaggtatgtatgtacgaatgtgtatatattatatatatgacatctattttggaaaatgtttgccctgctgtacctcatttttaggaggtgtgcatggatgcaatatatgaaaatgggacattctggaactgctggtcaggggactttgtcgccctgtgcactaaaagggccagattttcagcagccaaggacatccatacccaagtgaatgtgatgggacttaaaagaagtgaactgagacaattcactctggctgtttgaacagcagcgtttcataggaagagaaaaaaagatcaatcttgtattttctgaccacataaaggcttcttctctttgtaataaagtagaaaagctctcctca

SEQ ID NO: 176 - DNA, 5229 bp, Homo sapiens
cacgtaaagggacagagattgggggacagaaggaagtgcattaattccttccacgacccctgaagagcagcggtgggtctgagcatcctatctccaggaagcaggccagcaggcaagccagctgccacctcgtcctgtgcaaagcacaggcaccgtccccaaaagatttccaaagatgatgttaaacccagccacggttctgatctccaggaaagcaattgctgtggtacaaaaggacaagggttaaaagagaacagtgggagctctctttcccagctaactcacgcagtgtgacgcagaggctttcagcacagcccagggtgcccgggactgaaaactccttcaccagccccctccacaggatatagaagacttagatcactacgagatgaaagcagagcccattagtgggaaaaagttggaggatgaaggaattgaaaaagaaaatttggcaatattagagaaattaggaagactgaaagacaagagcatttaactgcaaactgttgtcgttgtcaactgggttgtcttcctgaagtatgaatccggtatgtattgtgtggaggagcattacgtattgaacttctcacaaaacagggctgaagcagtgcctactcgacagaaccggtcatcgtacaaagaaatgccacgtgactcaaaggcaaagccagagtgcagcttggagcaaagaagatgatgtctcactctgtcacccaagatggagtgcaatggcacgatctcagctcactgcaacctctgcctcccaggttcaagcaattatcctgcctcagccacccgagtagctgagattacaggcctctgccaccatgctcagctattttttgtatttttagtagagacggggtttcaccatgttgggcaggctagtcttggaactactgacctcaggtgatccgcccactttggcctcccgaaagtgctgggattacagtcatgagccaccatgcccagcctatttatttctgattctttaagggtgactggatgtgttgatcagcgctcgctgggatttggctgacgtggccccagccccgcctccctccccaccccacaatggcagaagaaactggacagagtaaattagctgcagccaagaaaaagttcaaagaatattggcagagaaaccgccctggtgttccagcagcagcgaagaggaacacgaaagcaaatggcagtagccctgagacggccgcttctggtggttgccactcatctgaggcttcctcctccgcctcctcctctctgcatgcgcgtcagagcccgtgccaagaacaagcagcagtcctgaactcgaggtccataaaaatcagtcgactgaatgacaccatcaaatctttgaaacaacagaagaaacaagtggaacatcagctggaagaagaaaagaaagcaaacaatgagaaacagaaagctgaaagggagctagagggtcaaatccagagattgaacacagagaaaaagaaactaaatacggacctgtatcacatgaaacattctctcagatactttgaagaagagtccaaggatctggccggccgcctgcaacgttcatcgcagcgtataggagagttagagtggtctctctgtgctgtcgccgccacacagaagaagaagccggatgggttctcgagccgcagtaaagcacttctcaagcggcagttagagcagtccatacgggagcagatactgctgaaaggacacgtgacacagttgaaggagtcgcttaaagaagtccagctggagagagatcaatatgctgaacaaataaaaggagagagggcccagtggcagcagaggatgaggaaaatgtcgcaggaggtttgcacattgaaggaggagaagaagcatgatacgcatcgggtagaggagctggagaggagcttgtccagactcaaaaaccagatggctgagccactgcccccggatgccccagcagtgtcctctgaggtggagctgcaagacctgaggaaggagctggagagagtggcaggagagctccaggctcaggtggaaaacaatcagtgcatcagtctcctgaaccgtgggcaaaaggagaggcttcgcgagcaggaggagaggcttcaggagcagcaggagaggcttcgggaacgggagaagaggcttcagcagctggccgagccacagagcgacttggaggagctgaagcacgagaacaagagcgcactgcagttggagcagcaagtaaaggagctgcaggagaagctgggccaggtgatggagacgctcacctcggccgagaaggagccagaggcagcagtcccagcctcagggactgggggcgagtctagcggccttatggacctcctggaggagaaggcggacctgagggagcatgtggagaaactggaacttggattcatccagtaccggagagagagatgccatcagaaagtacatcgccttctaacagagccaggggacagtgccaaagatgcgtcaccgggaggaggccatcatcaggctggcccaggacaaggaggagaggaaggtgaagctgctggagctgcaggagatggtgttgcggcttgtggcagctacagcgaggggcacggcaaattcctggccgctgcccggaaccctgctgctgaacccagtccaggagccccagccccccaggagctcggggctgccgacaagcatggtgatctttgtgaggcgagcctcaccaacagcgtggagcctgcacaaggagaagccagggagggttcttcccaggacaaccctactgcacagccagtcgtgcagctccttggtgagatgcaggaccaccaggagcacccaggcttgggcagcaactgctgtgtgccatgcttttgctgggcttggctgccgagaagaaggagataaacaccaccatcatcaaagagctgctcaagaaatttttaaaaacgaaacaaagttatggggttaatctcctacacaattcatttacttcatttgaatgttagagctactcatgattatttgtgtttctaatttatagtttaagtttatttgtaaaaagttaaaagagagtgggtctctgtggctctcactgatgttcactctggcatccttcagcatttttcttttttcatttcataattgtaggtcattagcatgcatatcgagtttgcccttacgtggtgggagttcaaacacacaaagacccactctttgcacaaaactgttctcgctggtttggaataggctcccgtgcttttctaatgttattgcagcatggatgtccattacagaattcagataaaatttgctaatgttctgctatgatgtttgatctcatcttaatcacagtgagctcttctatagctcaatatgcggtttgccctcaagtgtgcactgtttattactttgtaatatgccactgtgagtactgacatttagagctgtttaaaggccgagaactggaaacagcctttcctccattttctgtgtattggtgatgggagtgataaccttttgggggagctttctaaatctcacagaagaggaaagtggcctgctctggcaggtatgtgcaggatacagtgtgtttcatctgttccggtgccaagaatgagcagtgtactgtggcagttccctttggatttgtatgtgctctgggctcatgaagatattgcatcgtgagctgcagcagttgcactctttttcagtgacctaaaaagggcttatttccgaggaatgaaaggctgccatcattggctgtgggtgtgaaaaacctttcctagcttagagcatttgtatctacaatacattttaaagtcagagttcgtgttccctgttttaatcacatgactacctgtcccagtacacgaaagggcgctggttggcattcttcttaatgtatttagtgaagatcataagaaatcctttaagagtttaaatgtctctgaaacaggcatacaggctctagtcaagaatgaattagagtgaaggaaagctgtgtgacacctggcattcctctctgttcatggagcttctttgaggcttgaagtttgattttactatctagacctctctggctaatacctattcttcaaccacctcggttactctgacataggaatttacttcttttccttgagtggaaaacactttagaaagtaataacaaacattattataaactaatatatgtgagagtacttagttgaaacaaaaaggaattttagtagacagtattatattatctttgaaaatcaaggagaagtttatgcaacttaaaatgtttacacactgtggtgcaatctactgtttgtgaatgtctgtattatcaggaaacatgtctatacgatcgcagagttgtatttcctcacaaacttctttacgaagagtgaaatacgtttttgtacctctcattttcagtcagggacatactttgtgcaatatttctgtgattgtgcctatgcatgatgaatgaatgcatttcaatcatacattgcctaaatcataacttgatgatgcttgggaaagaatcaacagttaaaacttcatgaagttctaatgtctgtgttccaaaacacatcacattattaggttgtagggagatatgtaggtgtgctccctggggtggggagttttctagttactagaccatctccatttttagcacttggcagcctcatgatccttttataaatgtgagattaacaggagagcagcaatacgattttgccaatggaataacagatttgccggcattcactgaaagagggcagatattgggtccttgtaacttcaactgactcttccaaattgtatgaatttatcaatgtattacacaaatccagtttcagaatgataaaaaatgttagaccaaataatgcggctaattaacagtcgtatgatttctagcccatgggtttaaaactgtatcttaaagagtcattttaaaataatataaatattaaaaaatgtaactgctatcttaatgttctgaaataaaacattttaaaatataaatcctgtagtttaaaaggaagaaatggtgggaaggaaaagtagagaaagaaatgccaattccaggccaaagcgttatttgccaagttttcttagaatgaattttaccaatgtatgagttcttgttaacagaatgtgtaacggaaatactgaaagacttttgcttaaagtggcattattgactgctgatgtgatgctactgtaatgcaataaatttttaaattgttgcaaa

SEQ ID NO: 177 - DNA, 2726 bp, Homo sapiens
aaaaagtgccggtcaaaatggaagtgaatccccctaaacaggagcacctgctggcgctaaaagtgatgcggctgactaagcctactttattcaccaatatcccagtaacatgtgaagagaaagacttacctggagatctctttaaccagctgatgagagatgatccttcaaccgttaatggtgcagaagttttaatgttgggataaatgctgactttaccacagaattttgggaatatatttttgggagagaccttttccagttatatcagcgttcataatgatagcaatcaagttgtaaaagacatattagtaaaagctgatcttcagacaagttctcagcgtttaaatctttcagcctccaatgctgcagtggctgaacttaaaccggattgttgtattgatgatgtcatacatcatgaagtcaaagaaattggaacacacatcttggtatgtgctgtgagttatacaactcaggctggagaaaaaatgtatttcagaaaattcttcaaatttcaggttctcaaaccattggatgtgaaaaccaaattttacaatgcagagagtgacctcagttctgtgactgatgaagtatttctggaagcccagattcagaatatgacaacctcacctatgtttatggagaaggtttcactggagccatctattatgtacaatgtaacagaattaaattcagtcagccaagctggagaatgtgtgtctacgtttgggtcaagagcatatttgcaaccaatggatacacgccagtacttatactgcctaaagccaaagaatgaatttgcagaaaaagcaggcatcattaagggagtaacagtaattggaaaattggatatagtatggaaaacaaatctaggtgaaaggggaaggttacagaccagccaacttcaaagaatggctccaggttatggagatgttaggttgtctttggaggcaataccagataccgtaaaccttgaagaaccttttcatattacctgtaaaataacaaactgcagtgaaaggactatggatctggttttggaaatgtgcaataccaattccatccactggtgtggaatttcaggaagacagctgggaaagctgcatccaagttcttcgctctgtcttgcccttactctgctttcttcagtacagggactgcaaagcatctctggcttaagactaacagacacattcttaaagagaacatatgaatatgatgacatcgcacaagtctgtgtggtatcttctgccattaaagtggaaagctgaaggaaacttccaatgttaggcttttcatttagtttcacagaactgctctttttgttacctttgtaaaatgatgacgtcaacaacgaagtaaatatgttacttaaattttctttcctgtaaaatggttaaaatattaaatatttgttttgaagagatctgattttatcttgtaatttatatttgaaatgaacatgtgtatattttctacacctattatttaatttcatttcattttagatgaccattggactttgttctccaaaagctgtgtatctgagaccatttgtccctagcaagttatctagaacacgagtcagcacactttttatgtaaggtacaagatactaaatattttaggctttgcaggccgtaaggtttctgtcacaaatactgaactctgccatcgtacttcaagagcagccagtaggcaaaaaaagtacagtggtgtacacaaaaagaagcagttggactcgggaagctgaggcaggagaatcacttgaaccggggaggcagaggttgcagttaagccgagatcatgctactgcactctagcctgagcgacagagtgagactctgtctcaaaaaaaaaagaggcagctgggcagatttggcctgcagggtatagttggctgacctcaatctagaagatagagttgtttcttagaactttgtaatattttggttagaaatatttcagttaactccagttttttcctagctattcggtcagcagaaaaagtttgcttagaacaaagggggtagtcctcttataacctgatatttgtcaacacagtataagctttctagttgttttcaaaattactgtaatggtttgtgtctgtatttgtatattatacctacaaacatacatatctttcagctactgaacacatcagaattggttttactttttaggttgttgattttttttaattaactattaactaagaataatacttattttctaattataagccaaaaacccctgggtttttttctcattgattaagccacttatttttataaggtatatttaaataattcccatcttctgatatgattttaaactctaaatcatgtgttactgttacaaaactttctctctccatgtaatcacacttagttatgagcaaagcagtgagaaagttgaggtgataaacaactttgcagcattaatgtaacaaaaagtttcagtatttgtcaggaaaacaaaagcttaggctgttaaataaaagctattctattttggtaagttgaaattcaagaatgtatatataatttcttaaatgtaagagtgcattaaatcaaatacaaaaattggtttttcaatgcatcattatttattgccataacaaattgtttggtccaaaatgaaagctatattcagaaggtttgcacctcaaaattgagtaataattaatgaaatgtctgtacaaaataaagtgcaagcagtgt

SEQ ID NO: 178 - DNA, 5809 bp, Homo sapiens
ccagccaatgggcagtgaggcctgacgcggggggcggacgctggggccgagggtagcttgagcgcggcggcggcgttgttcagtcagagcgagaacattccagaggtcgcccagctccggcgctgacgggtgtggaccgcggacgtcgctgggacagcccctccccgctgctcggcggcggcacctggcccggccgctcctcgctgcgcttcgcctccgcctcctcggactcggactcgggtttatatcgcgcctcacttcatcccagtcccgggcgagcagcgttgggtttatgtctttatttgacgaaaacgagctgttgcgcagccattggtacctgtattggggaaacatagcatacaagcaagaagcttacagcctcagtggcgaaaattttttcatgtcagagaccgagaactcttgcagtcgtttatgtcatcccttcttctccagacagaagataccaaaaagttgcaatcaaagatctcttcatcttattgataaagccactaataagccaaaatgtctgtcaatgtcaaccgcagcgtgtcagaccagttctatcgctacaagatgccccgtctgattgccaaggttgagggcaaaggcaatggaatcaagacagttatagtcaacatggttgacgttgcaaaggcgcttaatcggcctccaacgtatcccaccaaatattttggttgtgagctgggagcacagacccagtttgatgttaagaatgaccgttacattgtcaatggatctcatgaggcgaataagctgcaagacatgttggatggattcattaaaaaatttgttctctgtcctgaatgtgagaatcctgaaacagatttgcatgtcaatccaaagaagcaaacaataggtaattcttgtaaagcctgtggctatcgaggcatgcttgacacacatcataaactctgcacattcattctcaaaaacccacctgagaatagtgacagtggtacaggaaagaaagaaaaagaaaagaaaaacagaaagggcaaagacaaggaaaatggctccgtatccagcagtgagacaccaccaccaccaccaccaccaaatgaaattaatcctcctccacatacaatggaagaagaggaggatgatgactggggagaagatacaactgaggaagctcaaaggcgtcgaatggatgaaatcagtgaccatgcaaaagttctgacactcagtgatgatttggaaagaacaattgaggagagggtcaatatcctctttgattttgttaagaaaaagaaagaagagggtgttattgattcatctgacaaagaaatcgttgctgaagcagaaagactggatgtaaaagccatgggccctcttgttctaactgaagttctttttaatgagaagattagagaacagattaagaaatacaggcgccatttcctacgattttgtcacaacaacaaaaaagcccaacggtaccttcttcatggtttggagtgtgtggtagcaatgcatcaagctcagcttatctccaagattccacatatcttgaaggagatgtacgatgcagaccttttagaagaagaggtcatcatcagctggtcggaaaaggcctctaagaaatatgtctccaaagaacttgccaaagagattcgtgtcaaagcagaaccatttataaaatggttgaaggaggcagaggaagaatcttctggtggcgaagaagaagatgaagatgagaacattgaggtggtgtattcgaaggctgccagtgtaccgaaagttgagactgtaaagtcagacaacaaggatgacgacatcgatattgatgccatttaaagggatggatgcaacctagcttaacagtataatgctgcaaattttcctccattatcagccagaagtgcaacatgtatgtgcaaaagctaaaatggcttaacatcatgctacactttacactaaaaatctattactgtgagtggtctgttattaagcccaatgagacatctagggagtccatacacatcagtgagcagatgtagtttgcttatttatagcatgtttctttttgaaaaactagtggtggacacatttggatcacatttatacagttataaaaataaaggtttgattttggtcgttcttcagatgtttggctctgaatgacttaagctgaagtaactggctccttactttaaatgttctgccatcatttcacctgatgagcattcttggagcctgccagatattgttaggtcctggggctgcaaagaggtcctcaacaggatgtaaagcaaacttaattgtaattaatttattcagcccattaagaaagtactaaagttttatctctgtagttcctcaaattggcatctggtaatgtacattgtgaggtagactgataatgaaatgacagtgcaacatcttaaccaagaagtaaatatgacctcagtgtcctataaataatgtaagagcaggatttgaaacttggagagctgttttctcatttcatgtacacttgccccaaattgtctttgaagtcgtgtgcattgcacgttggatgagccagggaaattattacattaacaagcattttgtgtgtacgtagtagttactttgtactgagagaacttgctttggggtgcaattaataaactgattttatttgggagaaacaaggaagggtgcacttaactagcaacctaagcatgatttttcagcttttgcccttagggtttaaattacaattccaaaatgttagacatactgtattttttcgttcagtgtggctttaattttcccctcttgcagtttgttctgtaatgccttttacatttggacacatagtttatgctttttagattttggttgctttcttgccaaaataagtgttaactgtgtttcaaacttgattttctttcctttttcttttttttttcttccagaatgtcttatttaaaaagaaagctaaaagcatacttctaagtcagagcctctattttggtgtaagacttgggatattttttacttcacattgaatatagccaggcacccaagaagtctgatggccacctgagtgcaggtgacaaggacctgacagagcccatgcagggctttagatttggacacacaagagttgataacttcctcatgaactccttgcctgatctaaactcatattatgggttctgactgtttgagtaatcatcttcaaggttaaacctcttggcagttacccttttcacaaagtgcacagtgggaatcgagaatcgatagggttaattttggagcagtggcttataccattcacctctgtttttttgtgattatttcacagataatgagaccttaataacaaataggcgtaaaaaaattttcacattgaaatgatagaaacatttgatgtaataaaacttggttggcttgatattttaaggaattgaaacctagcaatcttattggagagacaagaattggtctccagctgcctttgatcaagattcgggtgcaagtggagcaggagccatatacctggagggaatgtgctttgtcacaccaaagaggatttttttttcttcaaacttgtatgttgcctaggtttcaaattctttgccgcaaggctgatctgctttcattaactggaattctgtaggagatactggtgacctaagctaagttgcactcagcatactcagtgtcaagctaatgaggttctattataaaggttctacttttaatctgagggaaaacatgttcagggcttctagaacactaaaaaatttggcttaaaccagtgttcagtctggtgccaaacttcgaatggaatacaaattcacataatctgaactttgttcacaggttatcctaatagagtaattcttcactttgctctattgaactgtcttaaggatttgtttaaacagctaagttacttgattaaaataatgataaaattgtattttgtctttgctttaatattaaagttaacaagttttcattttataatgagatcaaagcattggaatctgccctgttttgtagccgttgctttggatttgtgttggatgtatcctgcagttacacttgccagccccactcacaaaagttgttcatttcattgggtcactggctttatttgctagtcttgtctgtgaactgagcatctgcctcagttttattacttgaaatcttggcaggtgcttaatagggaacatacatacagctatgtaactgtgaataattgtatatatctctagttaagaatgagggaatggggaggtttgctttctaaacaagtgcattctgaaattgacttaaaaatttttagtgtgggtcctaaagtttagagatgggcaaggaggtctctaatccaccgcttcccgcttgagaagggaggggtatcaaaattgagccccaagctgtttgttccagtgtaccaagcactgactttatgcctttggcctggagatggcagaagtgaaagctggccatctgcaaaaagcagataagtgagtttgaaccttttgcattttgttagctcagtcagtcctcatcgtggtcctgaggcataggtactgttgtaccaaggtcacttatctaacaaaataacccttcatgtattttaaatttatttgacaagtctgcagacaatccttatctaaccagctattttcttaattgctacagcttgacctaccagtattccggagtaaccagcaaatgcaaagttaaccttgttcctgcatcatctttttgatggttcaaatttcagcctccctgactactacaaagccagagcagtcttagtaccagaaacagtgttgcactttcgttgcatgtgctgtgtgaccccaaggggacagggagtcactttggtcatctctgtccccagtacagatcttgattcatagtgacattccataagtggggtgacagcaaatgacttgcaggtagtctcattgtaggtttgtgcaccagagtgaccctgtgagcctttgttaataggttgggagctcagggtgtttatgtccacctgtctggtctagccaaacagtttttttctgggaatcaaatttctgtggtttttatggccagaaattttaaggacttgtgtgtgctgggatatgagaatagaagctacagagttcttttcttgggacctagactgggaggtgcaatgtcaggacctccaggtgaatggtaggatctgagttgaccctgcagttcggttatgcagtcaattatttctttttaagaggaggaggattcacttgggtgttgggatcaaatttggattctgtcccaggccttactgtaaaactaggggattgcctttccatatctgctgggggtggagacccttatgtgcagcactcaatcccactggaagcctaatgctgcagtcagaagcaatgcctggctggggcagtaggggaaattccacccaattttgctatgagcctaaaacctctttaaaaacggtcagttaactaaaaaataaaaatcaagtctttaggagagtagaaaacacaattaactaaaaagcagggacatctgaaagagacgtattaagttaacatttttaaaaatccaaatgaaagtaaatggaataaatgtatcaggtaaaggacaagttgtaagcttggatttttaggtctagcaatacactgtttacaagagcatcacctaaaatgtgacaaaagatgttgaaaggatgaaaaaaggtatagtagacatacactaaccaaaaatgtagctctttgaatctcagaaaaaagtagattttaataaagtgtgaaagttgtcaatcaaaaaaaaaaaaaaaaaaaaa

SEQ ID NO: 179 - DNA, 11365 bp, Homo sapiens
ggagccgcggggcttccatccttcctttgactgatttttaaattttaatttgtattttccccgccgccccgccccttttcctccgaccccgccctatcgctccccggcttccctgctctttcctttttcccggcttccttcctcgcgtttctttcccctgcgccctcggcttgcctctctccctcctccctcgctctctcccccttctctccccttcttcctcggtttcttccgtcctctctctccccctcctcctcccccgcctcctcctcctgcgctcccgccccctgccccctccccccgtgcctgcagacgcgcggatcgtccatgcgctcctcgcgggcagaatgctgggcagcagcgtcaagagcgtgcagcccgaggtggagctgagcagcggcggcggcgacgagggcgcggacgaaccgcggggcgccggcaggaaggcggcagcggcggacggcagaggcatgctgcccaagcgcgccaaggcgcccggcggcggcggcggcatggccaaggccagcgcggctgagctgaaggtcttcaagtccggcagcgtggacagccgtgtccccggcgggccgcccgcctccaacctgcgcaagcagaagtcactcaccaacctctcttttctcacggactccgagaaaaagctgcagctttatgagcccgaatggagcgacgatatggccaaggcgcccaaaggcttaggcaaggtggggtccaagggccgtgaagctccgctgatgtccaagacgctgtccaagtcggagcactcgctcttccaggccaagggcagcccggcgggcggtgccaagacccccctggctccgctcgcgcccaacctgggaaagccgagccggatccctcgaggaccctatgcggaggtcaagccgctcagcaaggcgcctgaagcggccgtgagcgaagatggcaaatcggacgacgagctgctctccagcaaggccaaggcgcaaaagagctctgggcctgtcccctctgccaagggccaggaggagcgcgccttcctcaaggtggaccccgagctggtggtgaccgtgctgggagacctggagcagctgctcttcagccagatgctggacccagagtcccagagaaagaggacagtgcagaatgtcctggatctccggcagaacctggaagagaccatgtccagcctgcgagggtcccaggtgactcacagctccctggagatgacctgctacgacagcgatgatgccaacccacgcagcgtgtccagcctctccaaccgctcgtcccctctgtcatggcgctatggccagtccagtccgcggctgcaggctggtgacgcgccctctgtgggtgggagctgccgctcggaggggacgcccgcctggtacatgcacggcgaacgggcccactactcccacaccatgcccatgcgcagccccagcaagctcagccatatctcccgcctggagctggtcgaatccctggactcggatgaggtggacctcaagtccggctacatgagcgacagtgacctcatgggcaagaccatgacggaggatgatgacatcactaccggctgggatgaaagcagctccatcagtagtggactcagcgatgcctcagacaatctcagttcagaagaattcaatgccagctcctcactcaactccctcccaagtactcccactgcttctcgcaggaactcaacaatagtgctacgcacagactcagagaagcgctcactggcagaaagtgggctgagctggtttagtgaatcagaggagaaagcccctaaaaaactggagtacgacagtggtagcctgaagatggaacctgggacttctaagtggcggagggagcggcctgagagctgtgatgattcatccaagggtggagaactgaaaaagcccatcagcctgggccaccctggttccctgaagaagggcaagaccccacctgtggctgtaacttcccccatcactcacacagcccagagtgccctcaaagtcgcaggcaaacctgagggcaaagctacagacaagggtaagcttgcagtgaagaatactgggctccaacgctcctcctctgatgctggtcgggaccgcctgagtgatgctaagaagcccccctcgggcattgctcgcccctccacttcgggatcctttggctacaagaagcctcctcctgccacaggcacagccactgtcatgcaaactggtggttcagccactctcagcaagatccagaagtcctcaggcatccctgtcaagccagtaaatgggcgcaagactagcttagatgtttccaacagtgcagagccaggattcctggctcctggagcccgttctaacatccagtaccgcagcctgccccggccagccaagtcaagttctatgagcgtgaccggcgggcggggtggacctcgccctgtgagcagcagcattgaccccagtctcctcagcaccaagcagggaggccttacgccttccagactgaaggagcctaccaaggtagccagtgggcggaccactccagcccctgtcaatcagacagatcgggaaaaggagaaggccaaagccaaggcagtggccttggactcagacaacatctccttgaagagtattggctccccagaaagtactcccaagaaccaagcaagccaccccacagccaccaagctggcagagctgccaccaacccctctcagggccacagcgaagagctttgtcaaaccaccctcactagccaatcttgacaaggtcaactccaacagtctggatctaccatcatccagtgataccacccatgcttcaaaggtcccagatctgcatgctacaagctcagcatctgggggccctctcccttcctgcttcacccccagtccggcacccatcctcaatattaactcagccagcttctcccagggcctggagctaatgagtggtttcagtgtgccaaaagagacccgcatgtaccccaaactctcaggcctgcacaggagcatggagtccctccagatgccaatgagcctccccagtgccttccccagcagtactcccgtccccaccccacctgctccccctgctgctcccacagaagaagagacggaagagctgacttggagtggaagccccagagctgggcaactggacagtaatcagcgggatcggaacactcttcccaagaaagggctcaggtaccagcttcagtcccaggaggagaccaaggagaggcgacattcccataccattggtgggctgcctgaatccgatgaccagtcagagctgccttctccccctgcacttcccatgtctctgagtgcaaagggccaacttaccaacatagtgagtcccactgcggccaccacgccaagaatcacccgctccaacagcatccccacccacgaggcggccttcgagctgtacagcggctcccaaatggggagcaccctgtccctggccgagagacccaagggaatgattcggtcaggatccttccgagaccccacggacgatgttcacggctcagtgctgtccctggcctccagtgcctcctccacctactcctcagctgaggagaggatgcaatctgagcaaatccggaagcttcgtagggaactggaatcatcccaggaaaaagtggccaccttgacgtctcagctttctgccaatgctaatctggtggctgcttttgagcagagcctggtgaatatgacatcccgcctgcgacacctggcagagacggccgaggagaaggacactgagctgctggatttgcgagaaaccatagactttctgaagaaaaagaactctgaggcccaggcagtcattcagggagcccttaatgcctcagaaaccacacccaaagaacttcggatcaagagacaaaactcctcagatagcatctcaagcctcaacagcatcactagccattccagcatcggcagcagcaaggatgctgatgcgaaaaagaagaaaaaaaagagttggcttcgaagttccttcaacaaagcgttcagtataaaaaaggggcccaagtcagcttcctcatactcggatatagaggagattgctacacccgactcttcagccccctcatcccccaaactacagcatggttctacagagactgcttcaccctccatcaagtcctccacctcgtcctccgtgggcactgatgtcaccgagggccctgctcacccagccccccacactaggctgttccatgcaaatgaggaggaggagccagagaagaaggaggtatcggagctgcgctctgagctatgggagaaggaaatgaagcttacagacatccgcttggaggccctcaactctgcccaccaactggatcagcttcgggagaccatgcacaacatgcagttggaggtggacctgctgaaagcagagaatgaccgactgaaggtagccccaggcccctcatcaggctccactccagggcaggtccctggatcatctgcattatcttccccacgccgctccctaggcctggcactcacccattccttcggccccagtcttgcagacacagacctgtcacccatggatggcatcagtacttgtggtccaaaggaggaagtgaccctccgggtggtggtgaggatgcccccgcagcacatcatcaaaggggacttgaagcagcaggaattcttcctgggctgtagcaaggtcagtggaaaagttgactggaagatgctggatgaagctgttttccaagtgttcaaggactatatttctaaaatggacccagcctctaccctgggactaagcactgagtccatccatggctacagcatcagccacgtgaaacgagtgttggatgcagagccccccgagatgcctccttgccgtcgaggtgtcaataacatatcagtctccctcaaaggtctgaaggagaaatgcgtcgacagcctggtgttcgagacgctgatccccaagccgatgatgcagcactacataagcctcctgctgaagcaccggcgcctcgtcctctcgggccccagcggcacgggcaagacctacctgaccaatcgcttggccgagtacctggtggagcgctctggccgtgaggtcacagagggcatcgtcagcaccttcaacatgcaccagcagtcttgcaaggatctgcaactgtatctttccaacctagccaaccagatagaccgggaaacaggaattggggatgtgcccctggtgattctattggatgacctgagtgaagcaggctccatcagtgagttggtcaatggggccctcacctgcaagtatcataaatgtccctatattataggtaccaccaatcagcctgtaaaaatgacacccaaccatggcttgcacttgagcttcaggatgttgaccttctccaacaacgtggagccagccaatggcttcctggttcgttacctgaggaggaagctggtagagtcagacagcgacatcaatgccaacaaggaagagctgcttcgggtgctcgactgggtacccaagctgtggtatcatctccacaccttccttgagaagcacagcacctcagacttcctcatcggcccttgcttctttctgtcgtgtcccattggcattgaggacttccggacctggttcattgacctgtggaacaactctatcattccctatctacaggaaggagccaaggatgggataaaggtccatggacagaaagctgcttgggaggacccagtggaatgggtccgggacacacttccctggccatcagcccaacaagaccaatcaaagctgtaccacctgcccccacccaccgtgggccctcacagcattgcctcacctcccgaggataggacagtcaaagacagcaccccaagttctctggactcagatcctctgatggccatgctgctgaaacttcaagaagctgccaactacattgagtctccagatcgagaaaccatcctggaccccaaccttcaggcaacactttaagggttcggcaatcactgtcacccccggacagcagaacgctggcatcagctatcttagctcctcctctcccctctcctctttcagagcactggctctccagccccaggaggagaacaggagggaggaggagatgaaagaggagggacaggttcttggtgctgtacctttgagaacttcctaggaaggaatggtggggtggcgtttgggaacttgtgccccctaaacacatttactggcctcctctaatgactttggggaaaagatgattctgggtctttcccttgacttcttgtttcaattacaaactcctgggctttctggggaggggttcagaaaacatcaaaacactgcagcagttcctaaatgattctcacaagcaaccctgagagagacagtcttgtgagggagatctgggggaggcaggaagctcctcagattttctcacagacccttcccaattccatcaccactgccaacaactcctcccccagagatctggctggagcccagaaaaagaagcatgtggtttaaaaaatgtttaaatcaatctgtaaaaggtaaaaatgaaaaacaaaaacaagcaaacaaacaaaaaacaatggaaaagatgaagctggagagagaggaaccagttgccaaggtagagagctgcccgctcctgccctctggatgacataggggacatcaacaagacggctgccaacctgagaagtcaccaaaccacaaaaataaccttacagccttcagggaaagactaccagctctgtctttctaccctctaatttaacaatgcataagagtcaataaaccctacttttttatttttggtttttattttgttttcatttttttctcccatttgcctatttatttttttgtttcccttttttttttctttttccgtttttccatttcctcacatgtccacgagatgcttgggttgcttttccaggggctagtttggcttttccaagtgggttttctttggagaatctgatgccatgcaattggcatgacacctgccatgccactatctttggcatccatggggcttatatgagacatgaagcattggctcagaagtagagggagaagaggaacccagttcccttgacttcccttttgagagcacacgttctgctgggtagctcaattgccagcctctgtcatgagaaggtatagccccatcttgatagaagagttactccgagctttatcatggaccagaggaaaaccagaaaactgaaaacattcctctgtcttgtggccagtttggcctttcactgcactattctgatggtgcctgactgaatccaaatatcctagctggctcttactatttttcacaaatgagtattcacatataagagatgaacatccatgtgagatcatcccaatcagaatataagactcaaggagtttgacttggtggccaatacctgccttccaaagagatcctacctttgcagatttgctcctttcccattgccttgaaggtctggcaatccctgttctttcatttgacaagtacttactgagtactcactatatacaaatcattaggttaaaacagacacacacacacacacacacacacacacacacacacacacacacaagacctgggcccttaagtttacagtccagcaggaaatgttaacctccattcagctacgcccccttgttatctagaccttcgggatcatctaagaaatgtagctgaaacccaaggagccagctagaaagaagcttttgattagatgtacaatacattgggggcagaagatctgggatcaattaagatggagcctgaaggactatggaatcttgcttgtcaggaatgggcaagtctacttcctgccatttctgaaagccccgcgggaccagcttctaggctgagctgcctagtaggctgaagcttcaggactctgcaggtcaaggatatgtgatgagcaccggcctaagtgtttgctcttcagattcctaagtagcacaagactttatcagaatctataggcataccaacctggatcactcttccacccaaccgaggagtagatgcatctgaatcttcatatcggtatattaagtccaaaagatggtccgggctgcccctcacaaaagcttctgcatccacgtggtaagctcccatggatgacagggttctgtatgatggagactattattgctattgctgctaattccatgagctgtgaagatccctaaccaactcagctgtaacatatgcaattctgtggtgggaagaggctgtgtgtccaaggatggtgctgaaatcactgccttaaggtctctgctgtgcagaatgaggaggcccccgagctggctgttctaacttagaaggaagagaagactggatgggcctgcttgggatctaggcctcttctaaaccctatcctaagctccagttccatggcaaggctcagacttttaatgccatcttaatctgatggttgagcgcttcactctattttctggtgctgcccagccagtgccttctgccatggatgttactggctacttgagaaaaaggagaggggagaaccccttctttcattccaactgcctccgaccccaaagggattcttggctctctggtaaccatggataccaccatgaattttatttggatcctcagcaggttgattctggaggcctcatgctatgactttttatttctcttcctgggatccaccaccctctactctcagctgactgctgcatttaggccaggtctccaattgctttcctccagaaagtgtgttcccgtctagtgaggtagtattgaagcctcggctttccctctggagcctgggaccctgtttacagttgcacatctgggcccctcactgtggggattgatcattctcatgaaggaatcacagttatatggcaactgcagaaggctgagcctcctcatggtgctataaccccttgggacactcatccagacttctctgaagcagaaaacctgagctccccactcactgccctagaatttatggcaaggagcaaatctacagcattctctcccacctacgtcctgcttcttggttgagactactgggatccttcagaaaagaaacactgggtcccatagctaaattctcaaccgccaggcaccttcagaagaatccagcctaatactggaatttgtgctattatcttcctctccagccccccaactccatccctcaccacagttgtctaggaaatgacatgaattcaatatctaatgtcaaccaatggggagagccacaactccaggagaggttcctgagctgagtcccttaatttctggatgaagaagaccaacaagttttgtccaatgtatttgtttctcagaccttgcctaggcactaaaaataaaatactaggtcattggaggctaatgtgggacctgatgtctgcgtgtgtgtgtgtgtgtgtgtgtgtgtgtgtctccctctctcacacacacaagagcagtttgctgttgctgtttcctaccttctgaggcttcaaagtattttttaaaatctatgctttgtggcagctctacggtgcttatctctgtctttgtgtcaatccttaagtacccatgtctttttcatgtctaaccattgggaaggtagaggctggcagggaagacaaatctgctacaagtccatgggaagaccctacaatgaaatgttcattggttggtatactgttttagtcttgaattgccaactttccaactgatctatccatattccttaagtactaaagacaaaatagagggcttctttttctctcttaatgtcttgccttctggttttcctggtttgcaagactaagtgtacctaatctcaccatctcttcacttctagctctctgaaacaagggtcacactactcagagggataaccccttacagtggtctgaggagtaactatttcctaaagtattctaaaagagtaggaagagagaaatggtagcctgctgcttctcacagacacctcacatcctcacttgggatggcatccacatagaaaccctgcatttaggtaaaatttgcctgactgaaggggactcagtcctccaaatcaaggtcaagaagatatctgcatgagaccttaagaactctttattgccattatttggagagggcgggggaattgtcctaatcacacatttaacacagggaataagtgctgaagtgacccagatcaccaagcgcagttcctcatcatactttatttttgctttccttattccttggcactgactaagctaaagttaagaagccgacttcataagccaacccctgtgatgggatggaaaaatgggcttttgcagagggtttattaatagagatggatatactactcacaagttctggctcatggctccactgagaaggccatagtaataaaatgatcttatgaacactgttccccaaaggccaaagcctgaagatattgccccttataatccaatcagccttatattttaataagtcctgaatcaacctgactacggatatatggggccaccagggtgcatgggtgcatgtctgctcagcctagccctggaagtgagcactgccggccacagatcctgggaaaggtggtagtaacccagaagatgtagccttgaagggaggatacctatcaaaatgccaaagctgcagggacacgaagacggttgaaaattcaacctatgtatactagatccttccagtttgatggtttggtcattcttcttcatgattataccatggagaattttctgtgacaagggtggtcatggaagtaagtgagtgatcccctggtttctcattccttaaagcagtggttcgcaaagtatggcacaagaccagcagcatcagcagcctttgggaacttgttagaaacgaaaattctcaatcccatcccagatctgctgaatcagaaactctaatgagaggacccggcaatccacgttttaataagccctcctggtgattctgatgcacactaaattcaactgttttaaagggaaagccctttatagtattggagttcccacactgagaggctttggggcccaaaataagaaggttctaggttgtcattcagactttaacattaatttcaaagtcacctttctcatgcttccttgtgtttctgtttttccatttatgattttaacaaagaaaggtatgtgtgcttttgggtggaagttaggagaatgtttgtgtctttcctagttgaatacaaccttcagagaaaaaccttatgccttggaaattactacctggcacacaaaggggcttcaacaaggaaaagcagttggaggtctcttccagattgctcttctgccgaattatttgtatctattccgagctgattatgtaataggatggaaaaagt

SEQ ID NO: 180 - DNA, 3675 bp, Homo sapiens
ggaataagtgacatcatgagtgtgtgccaggtgtctgattacagaaggtgttcaattaatctgcaatcattaattaacccttcagtcgctggtattatttgccatccatcctccgagtgttgccaagttatgggtgcgttctgccagcgtcctagcagtggtaaggcttctggctgccagcggcgaacctctcccttcgagtatttctcctcttgctgagatgaaatgcgaccgggtctctttaagggccaggcgccgggatccaggcggcgcccaacggctggactagcagtcgtccgcgccgactcgcacaagaaggaaccccgggcctctggatccgctcgcccggctatgctgctgtggccgctgcggggctgggccgcccgggcgctgcgctgctttgggccgggaagtcgcgggagcccggcctcaggccccgggccgcggagggtgcagcgccgggcctggcctcccgataaagaacaggaaaaagagaaaaaatcagtgatctgtgtcgagggcaatattgcaagtgggaagacgacatgcctggaattcttctccaacgcgacagacgtcgaggtgttaacggagcctgtgtccaagtggagaaatgtccgtggccacaatcctctgggcctgatgtaccacgatgcctctcgctggggtcttacgctacagacttatgtgcagctcaccatgctggacaggcatactcgtcctcaggtgtcatctgtacggttgatggagaggtcgattcacagcgcaagatacatttttgtagaaaacctgtatagaagtgggaagatgccagaagtggactatgtagttctgtcggaatggtttgactggatcttgaggaacatggacgtgtctgttgatttgatagtttaccttcggaccaatcctgagacttgttaccagaggttaaagaagagatgcagggaagaggagaaggtcattccgctggaatacctggaagcaattcaccatctccatgaggagtggctcatcaaaggcagccttttccccatggcagcccctgttctggtgattgaggctgaccaccacatggagaggatgttagaactctttgaacaaaatcgggatcgaatattaactccagagaatcggaagcattgcccataggaggcaaaaggtctatggctcatgtctgaaaaatgcctgctgctgccaagttagctattgggagcaatctggaaaaacttgctcccaggagggctttgtgtctggccagcttgattttcctaatggtctcatctcctttgctagtgtctttgtcatgcgtctctggccctcgtgggtaaatgacaaacgggaccaatgggtttgccaagccctttgctgttcgcagcctcacattcccccggtgcctctcccatggctttgtgctgctgagtcgctctcatgaagcccttagggagagcacctgttgtgtgcctgacaccacgctggagctgtgtaccaatcgtctcagccttcattaggaggccgaggtaggagtcttatatcccaggtgaggaatttgaagctcagaaaggttgaggggctccccagaggtcacacagcctgtgtgcagtggagctggcaccattcagactttcagccgactcagcaactttcccttgccctgggctgcctcctcctgagagctgttccccaccgccctgcctcttccggttggaggctctcatgtctctttggggagagctggcagtgtgcggagctgataacattttcccaatattgagcagttcccaaggacagtcagcatttctagacttccacaaaattatgctgcatttggctggagcccggtgttcagtggtttccctgcccgaggtcgctgcagccccatctaccacatcttcatgtggacattgagattcacatgctggctcctgaagggtgctcagtctccttggtgattaaggtcctgcttgaactgctgccaactccatgtcagggaagtcgcttttggtgcctggctggtttgcccagagccaagctggggcaaggggcagccagccctggcttccaaggctcccgtactgtctgtgtccttgtataaggagctttgctcttggaattactgaaagtctgtggcccaagagagagacacaagtggccttaagtctttttgaagtgttatttcatccagggaaatgcctcgagccatagagcctgaaatcatctttgttggctcagaaaataccttagcttcactcagctggactgcattgaaggcgaggctgccccttggatcaagcagaaaacaagagaaagaaagaacgttccctttggggatagtctggaaagttgggatttgcaaataaaggctctggaagcattgctggtcctgaagctttggaggtgggcagagagagcttcaagaagactagatgcaaaccctggaaaggattaaggctcaactctggagaaacaggccacagcctctcagagcagctgttggctgtaaatagaggtagcaaggccgctcccaggcccctgtgagtgtgggcacctgtgcatgcaatgctccgactctgcagaggtgccaagtgcccctgctgggccagtcccagagagttaggaagtcaaggcctgcaactcctggttcttcctgtttggaccagttcttgtgccattggcaggatgagaggcagcagccaggcgggagctgtgtctagcagcacctgtagcccacgtgctgctaattagctggaaaactggcgaaggcagaacctttgctaccaggaatcttgacatgtggggtctgtctttgagaatttgtaaatgaacagtccaatatttcctctcggctcattttgcacatccatttttggggaaatgtgatttctctctctttttttttttttttttttgcctaaggcacaatctcaagaggtcctgagaccacgtacccatgatttttttcttgctctgtgatacccaataactccttcacctaagccctgttgttgattttgaagtgcttcctaggccagtgattttagcttctgccagctgcttttgccagtagattaacgtgtttttatttttcaaactccgtgtttcctaacgtggagtgtatgggtctaagagagcctgctgtcctccctgccttccaccttggagaggaggctggacgcatcagcagtggccagggcaggtcgcaaaatctcccagcctagagaccacacctgaaacggctgaagccagcttgcacaagggctgctgtccctctgcggcaggcagagctggtgggggcaggggtcacagagcagtcatagacaccatggaccagggcaggagaagggcagatggcacatgggcacaacagggccttgtccttagagcactggggggtcatggctgggaggggcatggcaggggctggcatccctgtagagccagaggggccacccagggcagtgacattccagatatgttgggctcacctcatccttgctgtgagactggagttccatggggacatgaagtcagtacaccgcagagctgctcagctgctctacctctcgctgacttttttgttgcacatatacattttctttcaattagcatttatttcagcttttatttaagctttttgacagtacatgtaaaatatatgattataaccatttaaaaata

SEQ ID NO: 181 - DNA, 2117 bp, Homo sapiens
tgcccacgcccccttcagatcctttgctccggagagagacctgtccgagcagaggcctggactacatctcccggcgtgcctggcagtgtggtggcctctgtgcgccgtctgcactcgttgcaggcgacgatgcagagggctgtaagtgtggtggcccgtctgggctttcgcctgcaggcattccccccggccttgtgtcgtccacttagttgcgcacaggaggtgctccgcaggacaccgctctatgacttccacctggcccacggcgggaaaatggtggcgtttgcgggttggagtctgccagtgcagtaccgggacagtcacactgactcgcacctgcacacacgccagcactgctcgctctttgacgtgtctcatatgctgcagaccaagatacttggtagtgaccgggtgaagctgatggagagtctagtggttggagacattgcagagctaagaccaaaccaggggacactgtcgctgtttaccaacgaggctggaggcatcttagatgacttgattgtaaccaatacttctgagggccacctgtatgtggtgtccaacgctggctgctgggagaaagatttggccctcatgcaggacaaggtcagggagcttcagaaccagggcagagatgtgggcctggaggtgttggataatgccctgctagctctgcaaggccccactgcagcccaggtactacaggccggcgtggcagatgacctgaggaaactgcccttcatgaccagtgctgtgatggaggtgtttggcgtgtctggctgccgcgtgacccgctgtggctacacaggagaggatggtgtggagatctcggtgccggtagcgggggcagttcacctggcaacagctattctgaaaaacccagaggtgaagctggcagggctggcagccagggacagcctgcgcctggaggcaggcctctgcctgtatgggaatgacattgatgaacacactacacctgtggagggcagcctcagttggacactggggaagcgccgccgagctgctatggacttccctggagccaaggtcattgttccccagctgaagggcagggtgcagcggaggcgtgtggggttgatgtgtgagggggcccccatgcgggcacacagtcccatcctgaacatggagggtaccaagattggtactgtgactagtggctgcccctccccctctctgaagaagaatgtggcgatgggttatgtgccctgcgagtacagtcgtccagggacaatgctgctggtagaggtgcggcggaagcagcagatggctgtagtcagcaagatgccctttgtgcccacaaactactataccctcaagtgaagctggctcagggtggggctgtcccttccaggagttttgcccctacaaggggttagtcaagaagctgaggcagaactcactgggggtgggcagttaaggtggaggctgattctaattgtctggttgaggggccacaccacctattccccccacctaactcatgccattccagcttccttcaggaccctgcttctgagtgacggaccagctcacacaatgtcttgtttcagtccatgatcccactgacctactcttgcctgctggagggtaatgagaagctttggttctgccatctctcccactctgccaggtgctggctgtggagcaaaggctcacctttgtggagaggataaaacctgcccaacctacctcaccatggtttttcacattgcaaagggtaataacatgggcagtgcggacttaggctaccccctccagtttgctttccgtaaatgcaaattgtccttactgcaagtcaggaatgattgctgactcacagtagggctgctatgcctgtgtgtaaacttggggatggctgagggaacatagactcactcttccacattcccaagttggtctagtgtgctgcccagtagcaaaccatggcagactcaccacctattctgagttccagggctgctgtagggcagggtgggcttcctcccagacttgccttaccctgggctgatctttgcccctggtatgcattaatggactccactgaatcctgaaaaaaaaattaaacttccttcttacttgccaaaaaaaaaaaaaaa

SEQ ID NO: 182 - DNA, 3727 bp, Homo sapiens
gtcgcggtgtgctaagcgaggagtccgagtgtgtgagcttgagagccgcgcgctagagcgacccggcgagggatggcggccaccgggaccgcggccgccgcagccacgggcaggctcctgcttctgctgctggtggggctcacggcgcctgccttggcgctggccggctacatcgaggctcttgcagccaatgccggaacaggatttgctgttgctgagcctcaaatcgcaatgttttgtgggaagttaaatatgcatgtgaacattcagactgggaaatgggaacctgatccaacaggcaccaagagctgctttgaaacaaaagaagaagttcttcagtactgtcaggagatgtatccagagctacagatcacaaatgtgatggaggcaaaccagcgggttagtattgacaactggtgccggagggacaaaaagcaatgcaagagtcgctttgttacacctttcaagtgtctcgtgggtgaatttgtaagtgatgtcctgctagttccagaaaagtgccagtttttccacaaagagcggatggaggtgtgtgagaatcaccagcactggcacacggtagtcaaagaggcatgtctgactcagggaatgaccttatatagctacggcatgctgctcccatgtggggtagaccagttccatggcactgaatatgtgtgctgccctcagacaaagattattggatctgtgtcaaaagaagaggaagaggaagatgaagaggaagaggaagaggaagatgaagaggaagactatgatgtttataaaagtgaatttcctactgaagcagatctggaagacttcacagaagcagctgtggatgaggatgatgaggatgaggaagaaggggaggaagtggtggaggaccgagattactactatgacaccttcaaaggagatgactacaatgaggagaatcctactgaacccggcagcgacggcaccatgtcagacaaggaaattactcatgatgtcaaagctgtctgctcccaggaggcgatgacggggccctgccgggccgtgatgcctcgttggtacttcgacctctccaagggaaagtgcgtgcgctttatatatggtggctgcggcggcaacaggaacaattttgagtctgaggattattgtatggctgtgtgtaaagcgatgattcctccaactcctctgccaaccaatgatgttgatgtgtatttcgagacctctgcagatgataatgagcatgctcgcttccagaaggctaaggagcagctggagattcggcaccgcaaccgaatggacagggtaaagaaggaatgggaagaggcagagcttcaagctaagaacctccccaaagcagagaggcagactctgattcagcacttccaagccatggttaaagctttagagaaggaagcagccagtgagaagcagcagctggtggagacccacctggcccgagtggaagctatgctgaatgaccgccgtcggatggctctggagaactacctggctgccttgcagtctgacccgccacggcctcatcgcattctccaggccttacggcgttatgtccgtgctgagaacaaagatcgcttacataccatccgtcattaccagcatgtgttggctgttgacccagaaaaggcggcccagatgaaatcccaggtgatgacacatctccacgtgattgaagaaaggaggaaccaaagcctctctctgctctacaaagtaccttatgtagcccaagaaattcaagaggaaattgatgagctccttcaggagcagcgtgcagatatggaccagttcactgcctcaatctcagagacccctgtggacgtccgggtgagctctgaggagagtgaggagatcccaccgttccaccccttccaccccttcccagccctacctgagaacgaagacactcagccggagttgtaccacccaatgaaaaaaggatctggagtgggagagcaggatgggggactgatcggtgccgaagagaaagtgattaacagtaagaataaagtggatgaaaacatggtcattgacgagactctggatgttaaggaaatgattttcaatgccgagagagttggaggcctcgaggaagagcgggaatccgtgggcccactgcgggaggacttcagtctgagtagcagtgctctcattggcctgctggtcatcgcagtggccattgccacggtcatcgtcatcagcctggtgatgctgaggaagaggcagtatggcaccatcagccacgggatcgtggaggttgatccaatgctcaccccagaagagcgtcacctgaacaagatgcagaaccatggctatgagaaccccacctacaaatacctggagcagatgcagatttaggtggcagggagcgcggcagccctggcggagggatgcaggtgggccggaagatcccacgattccgatcgactgccaagcagcagccgctgccaggggctgcgtctgacatcctgacctcctggactgtaggactatataaagtactactgtagaactgcaatttccattcttttaaatgggtgaaaaatggtaatataacaatatatgatatataaaccttaaatgaaaaaaatgatctattgcagatatttgatgtagttttcttttttaaattaatcagaaaccccacttccattgtattgtctgacacatgctctcaatatataataaatgggaaatgtcgattttcaataatagacttatatgcaggctgtcgttccggttatgttgtgtaagtcaactcttcagcctcattcactgtcctggcttttatttaaagaaaaaaaaggcagtattccctttttaaatgagctttcaggaagttgctgagaaatggggtggaatagggaactgtaatggccactgaagcacgtgagagaccctcgcaaaatgatgtgaaaggaccagtttcttgaagtccagtgtttccacggctggatacctgtgtgtctccataaaagtcctgtcaccaaggacgttaaaggcattttattccagcgtcttctagagagcttagtgtatacagatgagggtgtccgctgctgctttccttcggaatccagtgcttccacagagattagcctgtagcttatatttgacattcttcactgtctgttgtttacctaccgtagctttttaccgttcacttccccttccaactatgtccagatgtgcaggctcctcctctctggactttctccaaaggcactgaccctcggcctctactttgtcccctcacctccaccccctcctgtcaccggccttgtgacattcactcagagaagaccacaccaaggaggggccgcggctggcccaggagagaacacggggaggtttgtttgtgtgaaaggaaagtagtccaggctgtccctgaaactgagtctgtggacactgtggaaagctttgaacaattgtgttttcgtcacaggagtctttgtaatgcttgtacagttgatgtcgatgctcactgcttctgctttttctttctttttattttaaaaaatctgaaggttctggtaacctgtggtgtatttttattttcctgtgactgtttttgttttgtttttttcctttttcctcccctttagccctattcatgtctctacccactatgcacagattaaacttcacctacaaactccttaatatgatctgtggagaatgtacacagtttaaacacatcaataaatactttaacttccaa

SEQ ID NO: 183 - DNA, 6368 bp, Homo sapiens
ccatggacctgcgccctgagctgcccaccaccctgggccccgtcagcctgcgccagctggggctggagcacacccgctacccctgtctggaccttggtgccatgttgctctacaccctgaccttctggctcctgctgcgccagtttgtgaaagagaagctgctgaagtgggcagagtctccagctgcgctgacggaggtcaccgtggcagacacagagcctacgcggacgcagacgctgttgcagagcctgggggagctggtgaagggcgtgtacgccaagtactggatctatgtgtgtgctggcatgttcatcgtggtcagcttcgccggccgcctcgtggtctacaagattgtctacatgttcctcttcctgctctgcctcaccctcttccaggtctactacagcctgtggcggaagctgctcaaggccttctggtggctcgtggtggcctacaccatgctggtcctcatcgccgtctacaccttccagttccaggacttccctgcctactggcgcaacctcactggcttcaccgacgagcagctgggggacctgggcctggagcagttcagcgtatccgagctcttctccagcatcctggtgcccggcttcttcctcctggcctgcatcctgcagctgcactacttccacaggcccttcatgcagctcaccgacatggagcacgtgtccctgcctggcacgcgcctcccgcgctgggctcacaggcaggatgcagtgagtgggaccccactgctgcgggaggagcagcaggagcatcagcagcagcagcaggaggaggaggaggaggaggactccagggacgaggggctgggcgtggccactccccaccaggccacgcaggtgcctgaaggggcagccaagtggggcctggtggctgagcgcctgctggagctggcagccggcttctcggacgtcctctcacgcgtgcaggtgttcctgcggcggctgctggagcttcacgttttcaagctggtggccctgtacaccgtctgggtggccctgaaggaggtgtcggtgatgaacctgctgctggtggtgctgtgggccttcgccctgccctacccacgcttccggcccatggcctcctgcctgtccaccgtgtggacctgcgtcatcatcgtgtgtaagatgctgtaccagctcaaggttgtcaacccccaggagtattccagcaactgcaccgagcccttccccaacagcaccaacttgctgcccacggagatcagccagtccctgctgtaccgggggcccgtggaccctgccaactggtttggggtgcggaaagggttccccaacctgggctacatccagaaccacctgcaagtgctgctgctgctggtattcgaggccatcgtgtaccggcgccaggagcactaccgccggcagcaccagctggccccgctgcctgcccaggccgtgtttgccagcggcacccgccagcagctggaccaggatctgctcggctgcctcaagtacttcatcaacttcttcttctacaaattcgggctggagatctgcttcctgatggccgtgaacgtgatcgggcagcgcatgaactttctggtgaccctgcacggttgctggctggtggccatcctcacccgcaggcaccgccaggccattgcccgcctctggcccaactactgcctcttcctggcgctgttcctgctgtaccagtacctgctgtgcctggggatgcccccggccctgtgcattgattatccctggcgctggagccgggccgtccccatgaactccgcactcatcaagtggctgtacctgcctgatttcttccgggcccccaactccaccaacctcatcagcgactttctcctgctgctgtgcgcctcccagcagtggcaggtgttctcagctgagcgcacagaggagtggcagcgcatggctggcgtcaacaccgaccgcctggagccgctgcggggggagcccaaccccgtgcccaactttatccactgcaggtcctaccttgacatgctgaaggtggccgtcttccgatacctgttctggctggtgctggtggtggtgtttgtcacgggggccacccgcatcagcatcttcgggctgggctacctgctggcctgcttctacctgctgctcttcggcacggccctgctgcagagggacacacgggcccgcctcgtgctgtgggactgcctcattctgtacaacgtcaccgtcatcatctccaagaacatgctgtcgctcctggcctgcgtcttcgtggagcagatgcagaccggcttctgctgggtcatccagctcttcagccttgtatgcaccgtcaagggctactatgaccccaaggagatgatggacagagaccaggactgcctgctgcctgtggaggaggctggcatcatctgggacagcgtctgcttcttcttcctgctgctgcagcgccgcgtcttccttagccattactacctgcacgtcagggccgacctccaggccaccgccctgctagcctccaggggcttcgccctctacaacgctgccaacctcaagagcattgacttccaccgcaggatagaggagaagtccctggcccagctgaaaagacagatggagcgtatccgtgccaagcaggagaagcacaggcagggccgggtggaccgcagtcgcccccaggacaccctgggccccaaggaccccggcctggagccagggcccgacagtccagggggctcctccccgccacggaggcagtggtggcggccctggctggaccacgccacagtcatccactccggggactacttcctgtttgagtccgacagtgaggaagaggaggaggctgttcctgaagacccgaggccgtcggcacagagtgccttccagctggcgtaccaggcatgggtgaccaacgcccaggcggtgctgaggcggcggcagcaggagcaggagcaggcaaggcaggaacaggcaggacagctacccacaggaggtggtcccagccaggaggtggagccagcagagggccccgaggaggcagcggcaggccggagccatgtggtgcagagggtgctgagcacggcgcagttcctgtggatgctggggcaggcgctagtggatgagctgacacgctggctgcaggagttcacccggcaccacggcaccatgagcgacgtgctgcgggcagagcgctacctcctcacacaggagctcctgcagggcggcgaagtgcacaggggcgtgctggatcagctgtacacaagccaggccgaggccacgctgccaggccccaccgaggcccccaatgccccaagcaccgtgtccagtgggctgggcgcggaggagccactcagcagcatgacagacgacatgggcagccccctgagcaccggctaccacacgcgcagtggcagtgaggaggcagtcaccgaccccggggagcgtgaggctggtgcctctctgtaccagggactgatgcggacggccagcgagctgctcctggacaggcgcctgcgcatcccagagctggaggaggcagagctgtttgcggaggggcagggccgggcgctgcggctgctgcgggccgtgtaccagtgtgtggccgcccactcggagctgctctgctacttcatcatcatcctcaaccacatggtcacggcctccgccggctccctggtgctgcccgtgctcgtcttcctgtgggccatgctgtcgatcccgaggcccagcaagcgcttctggatgacggccatcgtcttcaccgagatcgcggtggtcgtcaagtacctgttccagtttgggttcttcccctggaacagccacgtggtgctgcggcgctacgagaacaagccctacttcccgccccgcatcctgggcctggagaagactgacggctacatcaagtacgacctggtgcagctcatggcccttttcttccaccgctcccagctgctgtgctatggcctctgggaccatgaggaggactcaccatccaaggagcatgacaagagcggcgaggaggagcagggagccgaggaggggccaggggtgcctgcggccaccaccgaagaccacattcaggtggaagcgagggtcggacccacggacgggaccccagaaccccaagtggagctcaggccccgtgatacgaggcgcatcagtctacgttttagaagaaggaagaaggagggcccagcacggaaaggagcggcagccatcgaagctgaggacagggaggaagaagagggggaggaagagaaagaggcccccacggggagagagaagaggccaagccgctctggaggaagagtaagggcggccgggcggcggctgcagggcttctgcctgtccctggcccagggcacatatcggccgctacggcgcttcttccacgacatcctgcacaccaagtaccgcgcagccaccgacgtctatgccctcatgttcctggctgatgttgtcgacttcatcatcatcatttttggcttctgggcctttgggaagcactcggcggccacagacatcacgtcctccctatcagacgaccaggtacccgaggctttcctggtcatgctgctgatccagttcagtaccatggtggttgaccgcgccctctacctgcgcaagaccgtgctgggcaagctggccttccaggtggcgctggtgctggccatccacctatggatgttcttcatcctgcccgccgtcactgagaggatgttcaaccagaatgtggtggcccagctctggtacttcgtgaagtgcatctacttcgccctgtccgcctaccagatccgctgcggctaccccacccgcatcctcggcaacttcctcaccaagaagtacaatcatctcaacctcttcctcttccaggggttccggctggtgccgttcctggtggagctgcgggcagtgatggactgggtgtggacggacaccacgctgtccctgtccagctggatgtgtgtggaggacatctatgccaacatcttcatcatcaaatgcagccgagagacagagaagaaatacccgcagcccaaagggcagaagaagaagaagatcgtcaagtacggcatgggtggcctcatcatcctcttcctcatcgccatcatctggttcccgctgctcttcatgtcgctggtgcgctccgtggttggggttgtcaaccagcccatcgatgtcaccgtcaccctcaagctgggcggctatgagccgctgttcaccatgagcgcccagcagccgtccatcatccccttcacggcccaggcctatgaggagctgtcccggcagtttgacccccagccgctggccatgcagttcatcagccagtacagccctgaggacatcgtcacggcgcagattgagggcagctccggggcgctgtggcgcatcagtccccccagccgtgcccagatgaagcgggagctctacaacggcacggccgacatcaccctgcgcttcacctggaacttccagagggacctggcgaagggaggcactgtggagtatgccaacgagaagcacatgctggccctggcccccaacagcactgcacggcggcagctggccagcctgctcgagggcacctcggaccagtctgtggtcatccccaatctcttccccaagtacatccgtgcccccaacgggcccgaagccaaccctgtgaagcagctgcagcccaatgaggaggccgactacctcggcgtgcgtatccagctgcggagggagcagggtgcgggggccaccggcttcctcgaatggtgggtcatcgagctgcaggagtgccggaccgactgcaacctgctgcccatggtcattttcagtgacaaggtcagcccaccgagcctcggcttcctggctggctacggcatcatggggctgtacgtgtccatcgtgctggtcatcggcaagttcgtgcgcggattcttcagcgagatctcgcactccattatgttcgaggagctgccgtgcgtggaccgcatcctcaagctctgccaggacatcttcctggtgcgggagactcgggagctggagctggaggaggagttgtacgccaagctcatcttcctctaccgctcaccggagaccatgatcaagtggactcgtgagaaggagtaggagctgctgctggcgcccgagagggaaggagccggcctgctgggcagcgtggccacaaggggcggcactcctcaggccgggggagccactgccccgtccaaggccgccagctgtgatgcatcctcccggcctgcctgagccctgatgctgctgtcagagaaggacactgcgtccccacggcctgcgtggcgctgccgtcccccacgtgtactgtagagttttttttttaattaaaaaatgttttatttatacaaatgg

SEQ ID NO: 184 - DNA, 3277 bp, Homo sapiens
cgaacacgccgcggtcctcgtcgtggtgagcgcagccactcaggctggtcctgggggtggggctgtaggggaaagtgctaaagccgctgagtgaagtaagaactctgctagagaggaaatggctgcttcatcatcatcctcctcagctggtggggtcagtggaagttctgtcactggatctggtttcagtgtctcagaccttgccccaccacggaaagcccttttcacctaccccaaaggagctggagagatgttagaagatggctctgagagattcctctgcgaatctgtttttagctatcaagtggcatccacgcttaaacaggtgaaacatgatcagcaagttgctcggatggaaaaactagctggtttggtagaagagctggaggctgacgagtggcggtttaagcccatcgagcagctgctgggattcaccccctcttcaggttgatactgcctggatggtcacctctggtgcgcagcaagtgcaaagccagtgggggactttctcacagcttacatagccatccagagatccacagctacgtcactgaattgttaatgcacatttgtacttggtttctctgtatctattcacaggcaacaaatacttatatgtgtgatctttcagggaatgttttgtttatttgtttttaaaagtattgggaatcagattaagacaatcagtttcagagaaccaggaggtttggggttaagagatactcaaaaattttcacaagccaagtagggcatatatcagatttggccaactgaatggcgtctgtcctgtcatccatatggtgcctggaaatatttaccagtcaaggtcaaggtcagcatctgtggttaaaaatatagcattctgacctaaaaaagttattttgcagatgaatgtgttttcaactcaggacctatccaaatgaggaatttttaaatattcttttttttttcctatttttagacatcaattctatagattctgactttttctaacctcttatagacatgccaaatgctggcaaaaagaagtgctttttggatatggcagcacttgtaaaaataaagcagtaagcaaaatccttttaaacacagaaatcctgagttcttctcattggtggactcaagcaattctgtagcaaataaatcctttgaaagagctccaaattggtggcattatcctttcaaaatctcagggatttgggatgaagtgaagaggtcaaattactttttagaagaagggaatctaaaaaccatctctcctaaacaaatggtagactggctttacttaagggatatttgtctttataggagtacataaatttatcttaatgatatttaagtagtttttttttttttttgggacgaagttttgctcttgttgcccaggctgtatcgcaatggcgcggtctctgctcactgcagcatccgcctcccgggttcgggcggttctcctgcctcagcctcccgagtagctgggattacaggcgcccgccaccacacccagctaattttttgtatatttggtagagacggggtttcaccgtgttgaccaggctggtctcgagcttctggcctcaggtgatccacctgcctcagcctcccaaattgctgggattgcaggcgtgagccaccttgcccagccaatttttttttaaagagacatggtcttgctatgttgcccaggttggtcttgaactcctggcctcaagagatccccccaaccttggcctccaaagtgctgggattacaggcatgagccaccgcgcctggcctcaagtaagtttttataccatgataggggaaaacctggaaggctaagagatgtgctgttttccttcatgggaccccactttccacagtaaacaactggtataatcatttattacgttgtatgcaaattttgccttagacaacatttgtctggttccttattaataacttgcatctgatctgcttagagttgcttaattataagtaaatataatcccagtagcatttagccttaatctcaagagttcaaaatgtttaacacattctacctgacgggaggtggtgacctcattcagtcggttaagagcctgagccctgtgaagttaaacacctgctcatggtcacatagcccaggcagaagaaaatctcggacttggaatagatcccagttgcctgataattcatctcattattgcctctaaagcaaattggagactgggcacagtggctcccacctttaatcccagcacctggggaggctgaggtgagtggatcactagaggtcaggagttcaagaccagtctggccgacatggtgaaactcagtctctattgaaaatacaaaaattagctcagtgtggtggcacacacttgtaatcccagctactcaggaggctgaggcatgagaatcgcttaaacccaggaggcggaggttgcagtgagctgagatcacaccattgcactctagtctgggtgacagagcgagactctgtctcaaaaaaaaaaaaataaagccgggcgtggtggctcacgcctgtaatcccggcactttgggaggctgaggcaggcggattgcctgagatcgggagttcgagaccagcctggccaacatggtgaaaccttgtctctactaaaactacaaaaaaaattggccaggcgtggtggcgggcgcctgtaatcccagctactcgggaggctgaggcagcagaatcgtttgaacccgggaggcggaggttgcagtgagtggagatcgtgcctgtgtgctccagcctgagcaacaagagcgaaactgtctcaaaaaaaagaagaaaataaataaataaaaatcagagcacaagaagtaccagtccaccaactcacattttctatattaataattcttaactaaaagaagttccatattcgacagcattttagttttttaatagtacttattagcatcaaccatcttgataatcaccaagggaaaaattaaaaatacctagactgcaataaacctttaaattggattttcagtgagaatttagaagcaatcactacctttctcgtttcatttgtgtaaccatgcagcataggcactgtgttacatcatctttacgctttggtatttgaacttattacagaattttttctctaaattggatgtttctttatatgaccttggaaactgaagtgatcttagcattaaacaaaaatgctttttgaaaaaaaaaaaaaaaaaaaaaaaaaaaaaaaaaaaaaaaaaaaaaaaaaaaaaaaaaaaaaaaaaaaaaaaaaaaaaaaaaaaa

SEQ ID NO: 185 - DNA, 1908 bp, Homo sapiens
aaagaaacccgagacgttccgaagtcaacgcaagcaaaggggagtgcgggtcggggaggaatattcttttggaaacgtaatattggccttggggctctccagccctttgggacttccaatgggatcttagaagcagccgaagcagcgtgagggcggcagcccagggccagccacgatttgaacgctctgccttgcagctcttctggaccgaggagcccaaagccctaccctcaccattcaccaggtcctgtgggaagagcagcgtggaggtgggctgaggttagaaggtgcagagcgtggaagaagattgtgagctgagtattggacatctgttcttgaatagtccctgggcctgccataggaaaggaagttctccagggttacagttcttatccgcgtgaatacacatggctctgttacgaaaaattaatcaggtgctgctgttccttctgatcgtgaccctctgtgtgattctgtataagaaagttcataaggggactgtgcccaagaatgacgcagatgatgaatccgagactcctgaagaactggaagaagagattcctgtggtgatttgtgctgcagcagggaggatgggtgccactatggctgccatcaatagcatctacagcaacactgacgccaacatcttgttctatgtagtgggactccggaatactctgactcgaatacgaaaatggattgaacattccaaactgagagaaataaactttaaaatcgtggaattcaacccgatggtcctcaaagggaagatcagaccagactcatcgaggcctgaattgctccagcctctgaactttgttcgattttatctccctctacttatccaccaacacgagaaagtcatctatttggacgatgatgtaattgtacaaggtgatatccaagaactgtatgacaccaccttggccctgggccacgcggcggctttctcagatgactgcgatttgccctctgctcaggacataaacagactcgtgggacttcagaacacatatatgggctatctggactaccggaagaaggccatcaaggaccttggcatcagccccagcacctgctctttcaatcctggtgtgattgttgccaacatgacagaatggaagcaccagcgcatcaccaagcaattggagaaatggatgcaaaagaatgtggaggaaaacctctatagcagctccctgggaggaggggtggccacctccccaatgctgattgtgtttcatgggaaatattccacaattaaccccctgtggcacataaggcacctgggctggaatccagatgccagatattcggagcattttctgcaggaagctaaattactccactggaatggaagacataaaccttgggacttccctagtgttcacaacgacttatgggaaagctggtttgttcctgaccctgcagggatatttaaactcaatcaccatagctgatataactctacccttaaaatattccctgtatagaaatgtggaattgtccctttgtagccaactataacattgttctttatgaatattacctttgatacatatgatccacaatataaaaaccaaaaactactgtgtgcaaattataccttggaccatataggcattgattaacttctttaagtacatgtgataactatggaaatcaagattatgtgactgaaaaacataaaggaagagacccatctagataacagcaatcaacctgcttaattctgaatgacaattatatccacaaatttttaaaacttctacatgtatttttcacatgaagatctccttaacaggttgccaaccttttcttttataaaactattacatttaaaatatggacgtctgaaaaataaaatattcatcatttttacaaaaaaaaaaaaaaaaaaaaaaaaaaaaa

SEQ ID NO: 186 - DNA, 10188 bp, Homo sapiens; identical to SEQ ID NO: 39

SEQ ID NO: 187 - DNA, 1826 bp, Homo sapiens
cacgtcggctgctgggaagatctggattctcgtttcaggtcaccatcagaaaagctaagtttgctgtatagtgaggatcaggagatctgatcctgattgcagaaccttccctgattacagaatcttggatgatttcacaaaagttcatcttcattgcagatacctgcctttctttctaggttgtatctcccacttcacccttctagaccatcccagaagatctataagatttcatctgggaaatcactaggagttcttggaagggaaagaaggaagattgttggttggaataaaaacagggttgaatgagttccagaaagcagggttctcaacctcgtggacagcaatctgcagaagaagagaacttcaaaaaaccaactagaagcaacatgcagagaagtaaaatgagaggggcctcctcaggaaagaagacagctggtccacagcagaaaaatcttgaaccagctctcccaggaagatggggtggtcgctctgcagagaaccccccttcaggatccgtgaggaagaccagaaagaacaagcagaagactcctggaaacggagatggtggcagtaccagcgaagcacctcagccccctcggaagaaaagggcccgggcagaccccactgttgaaagtgaggaggcgtttaagaatagaatggaggttaaagtgaagattcctgaagaattaaaaccatggcttgttgaggactgggacttagttaccaggcagaagcagctgtttcaactccctgccaagaaaaatgtagatgcaattctggaggagtatgcaaattgcaagaaatcgcagggaaatgttgataataaggaatatgcggttaatgaagttgtggcaggaataaaagaatatttcaatgtgatgttgggcactcagctgctctacaaatttgagaggccccagtatgctgaaatcctcttggctcaccctgatgctccaatgtcccaggtttatggagcaccacacctactgagattatttgtaagaattggagcaatgttggcctatacgccccttgatgagaaaagccttgcattattgttgggctatttgcatgatttcctaaaatatctggcaaagaattctgcatctctctttactgccagtgattacaaagtggcttctgctgagtaccaccgcaaagccctgtgagcgtctacagacagctcaccatttttgtcctgtatctgtaaacactttttgttcttagtctttttcttgtaaaattgatgttctttaaaatcgttaatgtataacagggcttatgtttcagtttgttttccgttctgttttaaacagaaaataaaaggagtgtaagctccttttctcatttcaaagttgctaccagtgtatgcagtaattagaacaaagaagaaacattcagtagaacattttattgcctagttgacaacattgcttgaatgctggtggttcctatccctttgacactacacaattttctaatatgtgttaatgctatgtgacaaaacgccctgattcctagtgccaaaggttcaacttaatgtatatacctgaaaacccatgcatttgtgctctttttttttttatggtgcttgaagtaaaacagcccatcctctgcaagtccatctatgttgttcttaggcattctatctttgctcaaattgttgaaggatggtgatttgtttcatggtttttgtatttgagtctaatgcacgttctaacatgatagaggcaatgcattattgtgtagccacggttttctggaaaagttgatattttaggaattgtatttcagatcttaaataaaatttgtttctaaatttc

SEQ ID NO: 188 - DNA, 7412 bp, Homo sapiens
cgcttctgctcaacctagaccagccccagcttcagcctcagctcccctccttcctggatcgagcgcccgcactcccggccctgcagccacccgagtcccgctcgctgtcgcctgcacgcgagtcccccctggcacgcgctcccacatcccgggatcgtcccaacggcccctgcgcccttcctgggatcactccgactgccccgcgcgccctgggatcggtccatctaccccgcgtggccccagctgcttgcccggagcgccagctagcgctccccgctctccgctccccggcactctcggggggcccgcccgccctgcaccctggagctccgggccgcgagcctctgccaactcctctggaccctcgcggccgtgggcagcggctgccgcgcctgtctgcccgagggaggaccttcgcctctgcatttgtccagtaactctggctgtgccggatactgcttgggtaaaacgggcaccccaggaacatggcagacgaagatctcatcttccgcctggaaggcgttgatggcggccagtccccccgagctggccatgatggtgattctgatggggacagcgacgatgaggaaggttacttcatctgccccatcacggatgacccaagctcgaaccagaatgtcaattccaaggttaataagtactacagcaacctaacaaaaagtgagcggtatagctccagcgggtccccggcaaactccttccacttcaaggaagcctggaagcacgcaatccagaaggccaagcacatgcccgacccctgggctgagttccacctggaagatattgccaccgaacgtgctactcgacacaggtacaacgccgtcaccggggaatggctggatgatgaagttctgatcaagatggcatctcagcccttcggccgaggagcaatgagggagtgcttccggacgaagaagctctccaacttcttgcatgcccagcagtggaagggcgcctccaactacgtggcgaagcgctacatcgagcccgtagaccgggatgtgtactttgaggacgtgcgtctacagatggaggccaagctctggggggaggagtataatcggcacaagccccccaagcaggtggacatcatgcagatgtgcatcatcgagctgaaggacagaccgggcaagcccctcttccacctggagcactacatcgagggcaagtacatcaagtacaactccaactctggctttgtccgcgatgacaacatccgcctgacgccgcaggccttcagccacttcacttttgagcgttccggccatcagctgatagtggtggacatccagggagttggggatctctacactgacccacagatccacacggagacgggcactgactttggagacggcaacctaggtgtccgcgggatggcgctcttcttctactctcatgcctgcaaccggatttgcgagagcatgggccttgctccctttgacctctcgccccgggagagggatgcagtgaatcagaacaccaagctgctgcaatcagccaagaccatcttgagaggaacagaggaaaaatgtgggagcccccgagtaaggaccctctctgggagccggccacccctgctccgtcccctttcagagaactctggagacgagaacatgagcgacgtgaccttcgactctctcccttcttccccatcttcggccacaccacacagccagaagctagaccacctccattggccagtgttcagtgacctcgataacatggcatccagagaccatgatcatctagacaaccaccgggagtctgagaatagtggggacagcggataccccagtgagaagcggggtgagctggatgaccctgagccccgagaacatggccactcatacagtaatcggaagtacgagtctgacgaagacagcctgggcagctctggacgggtatgtgtagagaagtggaatctcctcaactcctcccgcctccacctgccgagggcttcggccgtggccctggaagtgcaaaggcttaatgctctggacctcgaaaagaaaatcgggaagtccattttggggaaggtccatctggccatggtgcgctaccacgagggtgggcgcttctgcgagaagggcgaggagtgggaccaggagtcggctgtcttccacctggagcacgcagccaacctgggcgagctggaggccatcgtgggcctgggactcatgtactcgcagttgcctcatcacatcctagccgatgtctctctgaaggagacagaagagaacaaaaccaaaggatttgattacttactaaaggccgctgaagctggcgacaggcagtccatgatcctagtggcgcgagcttttgactctggccagaacctcagcccggacaggtgccaagactggctagaggccctgcactggtacaacactgccctggagatgacggactgtgatgagggcggtgagtacgacggaatgcaggacgagccccggtacatgatgctggccagggaggccgagatgctgttcacaggaggctacgggctggagaaggacccgcagagatcaggggacttgtatacccaggcagcagaggcagcgatggaagccatgaagggccgactggccaaccagtactaccaaaaggctgaagaggcctgggcccagatggaggagtaaccaggaaaatcactgccggctagtcccaagcaaacgggctaggaggaaagattaaaaaaacaacaacaacaacttatttagtttggggaggggaagcatttttaagtgtgttgtaaaatcaaattttatatttcattttttgactcttgaaaaatgtctttgctccttggcagctaccagcagagactctatagctgtctcttagggcagtattttggggaagtggggcttgaagaagcagcctaatgaaccaacataccgttttgtgtgtggttttttttgtttgtttgtttgtttgttttgagacagagtcttgctctgtcacccaggctggagtgcagtgacatgatcttagctcactgcaacctccgcctcctgggttcaagtgattctcctgcctcagcctcccaagtagctgggattactggtgcacaccaccacactcagctaatttttgcatttttagtagagatggggtttcaccatgttggccaggctggtctcgaactcctaacctcaggtgatccacctgcctcagcctcccaaagtgctgggattacaggtgtgagccaccatgcctgcccattttgtggttctattttcatttttatttctttttttttttttgtcacgagatataagaaagtgctttttgccttgaatggacaattttagggctgtgctcactagtcttttcaggctggactgaaatgtcgggcccatggagccctgtgttttgtgcatcgggatgagaaatgaagcacttcacgctggctttcctaagtcacggggcgtgtattgccgtggcttagtgcaaagcattctttctcagagcatttagaggcatgcgtggcattttttcagtgggtgtgagattgcacaatacccaggctcccttctactgtggggaagggcctgcatgttggctgttttttaaacttctagttcaatttccttccataatgctactgattttctggcatacagccgaattccatcttttaagcatgctttctacggtgggcttttcaaaacaggtttgagttttgtatgcacacgtttactacctctaactcctacatcagctagtgtggaagagggtgcacctcaaagcttttacacgtaaggacagcggcttggaatgtgagagccttttctccaagcagacccacactctgcatctcagtggcagctcccacaacgtgactgcaatgtctcttatacagtattccttggtgttttcttagtgtctggatgttcttacgtgaaatctgctccccagccctggtccttggcattttctgcttgaagctgggctgattttcttgtaatttacagcaggacgctttcagcagcagtctcttgggattttatctaagatgtttgaggatgagagggcaagaactataaacactcattaattctagtagtctccccatggccagacaatggcgattgttatttaatgagcttttcctttcaatggaattcagctctcacattagtatgatttcatttgatgtttcaaatagcaaagatgctaggtgcggtggctcccgcctgtaatctcagcactttgaggagggccaaggtgggaggattgcttgagctcaggacttcaagaccagcctgggtaaacatggcgagaccctgtctctaccaaaacaacaaaaaaaagacagactgctttgatcaaccctaaatgcaaaagcagcctatttttctttgtttaaaagtcaaaacataaaaaagcagagtataacatacaaaccattcttaactattcattaaaatgggtccttcaacaccttagtggggtttgttgttgttgcttatgcagagagattattttctttttattattttataatttttgaaatagagatggggtctcactgtgttgcccaggctggtctcgaactcctggacttaagtgagcctcccgcctcagtctcccaaagcgctgggattacaggcaggagccactgagcccagccaagacttcagtgttgactgctttggaggcacaaacccatgcaagcgttagttccaaagttcagtgtgtacccttaaatgaacaatgaagcaggtaaaattacccttgaaaaaaatcccttggaccacccataaatgacagtgactttttcaatatggactcatcatagccagttttccttttgaagttggaactgatcacccttttgtcatctgtaccagatcagtagttggcttgtgttacattttgtgtgtgtgtgtgcgtgttttaaaccagtgcatataaattgtatgttaaatgtaagtaactttaagttgacttatctcttcacagtaatcaagcctcacgtaattcatgctttttaaattcagccagccccccctctctgaaattttattatgtaaataatttgtgttccctgatcactcgtttaagttcttagttgtatgtcatctcttctctagcaggaattggcaaacttttttgtaaaggggtagaaagtgaagattttaggctttgcaggccatatagcctctgctgcaaatgctcagccctgctgttgtaatgtaaaagctgccacagacactacatgaacacgaatgagtgtggctggtgttccaataaaactttatttacacaaacgggtggcccttttgggctgtagtttgtcaacccttgctctaacccttgactgagagctactttattaagccctgagggcaggagctatcccaattttgtgttccccagggcaccaaaacacagtgctttggcatagagtaggcactcaacaagtgtgtgaacagatggagagccagccctagtcagtgcactcaccctttgaggctctggttcctccaaacaatgattcgttgtctggattggctggaactgtcacccccgcaattctactccccacccacccatgtgaccttaatgtcagttgctggtctgttgctcttcggggagggagagatggcctggatacagagctaagcaaatgcttctttaagggcccttaaaagtgaaaagtaacttgcaagaggttgagatccttctgagctaggagaacttattccaccttcaaaacctagtttgggctgggtgcagtggctcacgccactttgggaggctgaggtgggcggatcacctgaagtcagctactcgggaggctgaggcaggagaatcgcttgaacccaggaggcagaggttgcagtgagccgagattgcgtcactgcactccagcctgggcgacagagtgagactccgtctcgaaaccaaaaacaagaaaaacccctagttttgtgccttctgaagatagttaggacatcttctttttccgcaaatgctggacatgccaaaaacctaacgcaaaacccaggacattccagcccaactgggacgatatcagagaccatcttcaagtgcaagaagcaggtgaaagcccaggaaattggcagagccaggattatcatccagtactttcatttcacaaatggagaaaccgaggttctgccagctagattttttttcacagtgtcactgctagcaagccactaagctggagctgggatttgagagctgctgctatttagaggatcttgggaataaaatttaaactggagtttaatggccctttcagttttgctataggcaagagaataaaatgaatgaatggataggtggctttatgggtgtaagaaagaagcgaaaaaaactcccaaaccccagtgttcctgaatatctgttctccccctgaccactctgggaatttatcaaatgcagctttgacctccaagccaagtaaactgctcttgttgctattttagtggtttttgtttttttaagacacaaggtctcactttgttactcaggctggagtgcagtggcatgatcataactcattgtaggctcaacctcctgggccccagtgatcctcctgcctcagcctctcaagtagctaaaactacagatgtgcaccatcacatctggctaatttttttttttttttttttgaggtggagtctcgctctgttgcccagattcaagtgcaatggcacgttttggctcactgcaacctctgcctcccaggttcaagcgattctccctgtctcggcctcccgagtagctgggactacaggcacctgccaccacgcgcagctaatgtttgtatttttagtagagacgggggtttcaccatgttggccaggctggtttcaaactcctgacattaggtgatccacctgcctcggcctcccaaagtgctgggattacaggcatgagccaccgtgccaagccacgcctggctaattttttaaaattattttttgcagagacagagtttcactatgttgcccaggctggtcttgaactccttggcctcaagtgatcctcccacctcagcctcccaaagcattggggttacaggcgtgagccactgcacctggccctgttttcatggcttttatttcctttcatcccacacatttgtctgcagtactagacatgttttacaaatcaacaagtttacacaagtatatgcagcttgttttggggggaaaggagacaaaatatgcatattttctgtgtggatttgtgcctcttaattgtgtttctagtctctaaggtgaccctttaacctactcaagatggggcccagagaagtggcctgcgttacagatttattttggcatatgtactaagttccattttctctttacaaataaagtgttttctttcttttctgtctcaga

SEQ ID NO: 189 - DNA, 2478 bp, Homo sapiens
gaggtcagagagggaagccccggcggtgagagtcggcccaaaaagcggcggccgttggaggtggctgcggcagctgatgtggcctcatggatgagctggtacacgacttagcctcagccttggagcagacatctgagcagaataagcttggtgaactgtgggaggagatggcgctgagcccccgacagcagaggcggcagcttcggaaacgccgaggtcggaagcgtcgttctgacttcactcacctggcagagcatacctgctgctacagcgaggcctctgagtcaagtctggatgaggccactaaggactgtcgagaagtggctccggtgaccaattttagtgactctgatgacacaatggtagccaaacgacacccagctctcaatgccattgtcaagagtaagcaacattcttggcatgaatctgactcctttactgaaaatgcaccttgtcgaccactcaggcgcaggcggaaggtgaagcgagtgacatcagaggtggctgctagccttcagcagaagctgaaggtgtcagattggagctatgagagaggctgcaggttcaagtctgctaagaagcagcgtctgtcccgctggaaggagaatactccctggacctcatcaggccacggattgtgtgaatcagcagaaaataggactttcctaagcaaaacaggaaggaaagaaaggatggagtgtgaaacagatgaacaaaaacagggctctgatgagaacatgtcagaatgtgaaaccagcagtgtgtgtagcagcagtgacactgggctctttaccaatgatgaagggcgacaaggtgatgacgaacagagtgattggttctatgaaggagaatgtgtcccaggattcactgtccctaatcttctgcccaagtgggctcctgatcattgttctgaagtagaaagaatggattctggattggataaattttcagattccacattccttttaccttctcggccagctcaaagagggtaccatactcgcttgaatcgtctacctggagctgcagctcgatgcctcagaaaggggcgaagaaggctggttgggaaggagaccagcataaacactttggggactgagaggataagccatatcattagtgaccctcggcagaaagaaaagaataaagcgttggcttctgattttcctcacatttctgcttgtgcacatgagttcaatcccctgtctcccctttactccctggatgttcttgccgatgcttctcaccgaaggtgttcaccagcacactgctctgccagacaggcaaatgtacactggggaccaccatgttcacgtgacatcaagaggaagcggaaaccagtggccacagcatctttgtctagccccagtgcagttcacatggatgcagtggagccaaccacaccagcatcacaagcccccaaatcacccagctctgagtggttggtgaggacctctgcagcagagaaagccacagacgcaactactgctacattttttaaaatgccacaagaaaagagccctggatacagctagagagcaggacttcaccctccaggagctgactgggtgttgctgaagcaaatgttggactttgtgttagatagtcttgcatatcttaatcgacattcccagtcctttcaccaccagaaccaactcctctttcaaacacagcagtggattctttctctcagaagatcatgttgtgggaatcttttttttaaatagtgaaatattgaggcagcaattttttacaaaaaggtcatcctctgctctatttgttaccttgttattgctgtctcaacatttactacagctccatttacagaactgttgcttttttgcagttgtctttgttcttgaaaaaccagtaactgcttctgcataccttttgtgtagagcttttaatatcatttgaggaagttccaaatttgtagccagttccaaacaaatttaaatattgagttgagacctgtatggaattgtgttcgcaggagataaggcttgcctttgagcctactcttgattcatgcagagtgccaataagataaatcaaccaagttttggggcctcaaaagagacaccagcaactgggccttgagaacttccatttttttgcagattgtctgcagaaactcagacagctcatcagcagcagcagctgtattgtattttacctcatcttcagagtttatgttctactgaaagaggacgtgtgtatacacacacacacacacacacacacacagattggtataatggagaagatggtttaggtgtacagcaaatttaaaatagtcagtggattgtgtcttactacttcatgtcccagtgtaagcctttatgtcctaagcaggactttattgttagtattataggctaataacctgcagcagaaattcatactctattataataatggcttcttggggccatgctttggggaagtaaaatgtctttttgacatgcctttataaaa

SEQ ID NO: 190 - DNA, 3810 bp, Homo sapiens
gcggcggccgccttcggggaagggggtgggtccggggaggggtttgccatcctcctctagttaaaagtaagggggaaaagagtaaacgcgcgactccagcgcgcggctacctacgcttggtgcttgctttctccagccatcggagaccagagccgccccctctgctcgagaaaggggctcagcggcggcggaagcggagggggaccaccgtggagagcgcggtcccagcccggccactgcggatccctgaaaccaaaaagctcctgctgcttctgtaccccgcctgtccctcccagctgcgcagggccccttcgtgggatcatcagcccgaagacagggatggagaggcctctgtgctcccacctctgcagctgcctggctatgctggccctcctgtcccccctgagcctggcacagtatgacagctggccccattaccccgagtacttccagcaaccggctcctgagtatcaccagccccaggcccccgccaacgtggccaagattcagctgcgcctggctgggcagaagaggaagcacagcgagggccgggtggaggtgtactatgatggccagtggggcaccgtgtgcgatgacgacttctccatccacgctgcccacgtcgtctgccgggagctgggctacgtggaggccaagtcctggactgccagctcctcctacggcaagggagaagggcccatctggttagacaatctccactgtactggcaacgaggcgacccttgcagcatgcacctccaatggctggggcgtcactgactgcaagcacacggaggatgtcggtgtggtgtgcagcgacaaaaggattcctgggttcaaatttgacaattcgttgatcaaccagatagagaacctgaatatccaggtggaggacattcggattcgagccatcctctcaacctaccgcaagcgcaccccagtgatggagggctacgtggaggtgaaggagggcaagacctggaagcagatctgtgacaagcactggacggccaagaattcccgcgtggtctgcggcatgtttggcttccctggggagaggacatacaataccaaagtgtacaaaatgtttgcctcacggaggaagcagcgctactggccattctccatggactgcaccggcacagaggcccacatctccagctgcaagctgggcccccaggtgtcactggaccccatgaagaatgtcacctgcgagaatgggctaccggccgtggtgagttgtgtgcctgggcaggtcttcagccctgacggaccctcaagattccggaaagcgtacaagccagagcaacccctggtgcgactgagaggcggtgcctacatcggggagggccgcgtggaggtgctcaaaaatggagaatgggggaccgtctgcgacgacaagtgggacctggtgtcggccagtgtggtctgcagagagctgggctttgggagtgccaaagaggcagtcactggctcccgactggggcaagggatcggacccatccacctcaacgagatccagtgcacaggcaatgagaagtccattatagactgcaagttcaatgccgagtctcagggctgcaaccacgaggaggatgctggtgtgagatgcaacacccctgccatgggcttgcagaagaagctgcgcctgaacggcggccgcaatccctacgagggccgagtggaggtgctggtggagagaaacgggtcccttgtgtgggggatggtgtgtggccaaaactggggcatcgtggaggccatggtggtctgccgccagctgggcctgggattcgccagcaacgccttccaggagacctggtattggcacggagatgtcaacagcaacaaagtggtcatgagtggagtgaagtgctcgggaacggagctgtccctggcgcactgccgccacgacggggaggacgtggcctgcccccagggcggagtgcagtacggggccggagttgcctgctcagaaaccgcccctgacctggtcctcaatgcggagatggtgcagcagaccacctacctggaggaccggcccatgttcatgctgcagtgtgccatggaggagaactgcctctcggcctcagccgcgcagaccgaccccaccacgggctaccgccggctcctgcgcttctcctcccagatccacaacaatggccagtccgacttccggcccaagaacggccgccacgcgtggatctggcacgactgtcacaggcactaccacagcatggaggtgttcacccactatgacctgctgaacctcaatggcaccaaggtggcagagggccacaaggccagcttctgcttggaggacacagaatgtgaaggagacatccagaagaattacgagtgtgccaacttcggcgatcagggcatcaccatgggctgctgggacatgtaccgccatgacatcgactgccagtgggttgacatcactgacgtgccccctggagactacctgttccaggttgttattaaccccaacttcgaggttgcagaatccgattactccaacaacatcatgaaatgcaggagccgctatgacggccaccgcatctggatgtacaactgccacataggtggttccttcagcgaagagacggaaaaaaagtttgagcacttcagcgggctcttaaacaaccagctgtccccgcagtaaagaagcctgcgtggtcaactcctgtcttcaggccacaccacatcttccatgggacttccccccaacaactgagtctgaacgaatgccacgtgccctcacccagcccggcccccaccctgtccagacccctacagctgtgtctaagctcaggaggaaagggaccctcccatcattcatggggggctgctacctgacccttggggcctgagaaggccttgcgggggtggggtttgtccacagagctgctggagcagcaccaagagccagtcttgaccgggatgaggcccacagacaggttgtcatcagcttgtcccattcaagccaccgagctcaccacagacacagtggagccgcgctcttctccagtgacacgtggacaaatgcgggctcatcagcccccccagagagggtcaggccgaaccccatttctcctcctcttaggtcattttcagcaaacttgaatatctagacctctcttccaatgaaaccctccagtctattatagtcacatagataatggtgccacgtgttttctgatttggtgagctcagacttggtgcttccctatccacagcccccaccccttgtttttcaagatactattattatattttcacagacttttgaagcacaaatttattggcatttaatattggacatctgggcccttggaagtacaaatctaaggaaaaaccaacccactgtgtaagtgactcatcttcctgttgttccaattctgtgggtttttgattcaacggtgctataaccagggtcctgggtgacagggcgctcactgagcaccatgtgtcatcacagacacttacacatacttgaaacttggaataaaagaaagatttatgaaacgtgtctgtgtttcctttgacccacagcacctgggccctgagcagcaggcttcctatgttcagtggccagaagcagagcttcaggtacattcgtggttttctccggtggacatgggtcctcagatcccctccagcccagtgtggccaccagggcacctccttcaatagactccaaaaggggcagctcctaccatctgggagaagcaatctaaggagatcacaaaaagtaacggaacaggagtcataatctttcttgaactcctgtggtttttactgaaacttg

SEQ ID NO: 191 - DNA, 3672 bp, Homo sapiens
gcccggttacttcctccagagactgacgagtgcggtgtcgctccagctcagagctcccggagccgcccggccagcgtccggcctccctgatcgtctctggccggcgccctcgccctcgcccggcgcgcaccgagcagccgcgggcgccgagcagccaccgtcccgaccaagcgccggccctgcccgcagcggcaggatgaatgatttcggaatcaagaatatggaccaggtagcccctgtggctaacagttacagagggacactcaagcgccagccagcctttgacacctttgatgggtccctgtttgctgtttttccttctctaaatgaagagcaaacactgcaagaagtgccaacaggcttggattccatttctcatgactccgccaactgtgaattgcctttgttaaccccgtgcagcaaggctgtgatgagtcaagccttaaaagctaccttcagtggcttcaaaaaggaacagcggcgcctgggcattccaaagaacccctggctgtggagtgagcaacaggtatgccagtggcttctctgggccaccaatgagttcagtctggtgaacgtgaatctgcagaggttcggcatgaatggccagatgctgtgtaaccttggcaaggaacgctttctggagctggcacctgactttgtgggtgacattctctgggaacatctggagcaaatgatcaaagaaaaccaagaaaagacagaagatcaatatgaagaaaattcacacctcacctccgttcctcattggattaacagcaatacattaggttttggcacagagcaggcgccctatggaatgcagacacagaattaccccaaaggcggcctcctggacagcatgtgtccggcctccacacccagcgtactcagctctgagcaggagtttcagatgttccccaagtctcggctcagctccgtcagcgtcacctactgctctgtcagtcaggacttcccaggcagcaacttgaatttgctcaccaacaattctgggactcccaaagaccacgactcccctgagaacggtgcggacagcttcgagagctcagactccctcctccagtcctggaacagccagtcgtccttgctggatgtgcaacgggttccttccttcgagagcttcgaagatgactgcagccagtctctctgcctcaataagccaaccatgtctttcaaggattacatccaagagaggagtgacccagtggagcaaggcaaaccagttatacctgcagctgtgctggccggcttcacaggaagtggacctattcagctgtggcagtttctcctggagctgctatcagacaaatcctgccagtcattcatcagctggactggagacggatgggagtttaagctcgccgaccccgatgaggtggcccgccggtggggaaagaggaaaaataagcccaagatgaactacgagaagctgagccggggcttacgctactattacgacaagaacatcatccacaagacgtcggggaagcgctacgtgtaccgcttcgtgtgcgacctccagaacttgctggggttcacgcccgaggaactgcacgccatcctgggcgtccagcccgacacggaggactgaggtcgccgggaccaccctgagccggccccaggctcgtggactgagtgggaagcccatcctgaccagctgctccgaggacccaggaaaggcaggattgaaaatgtccaggaaagtggccaagaagcagtggccttattgcatcccaaaccacgcctcttgaccaggctgcctcccttgtggcagcaacggcacagctaattctactcacagtgcttttaagtgaaaatggtcgagaaagaggcaccaggaagccgtcctggcgcctggcagtccgtgggacgggatggttctggctgtttgagattctcaaaggagcgagcatgtcgtggacacacacagactatttttagattttcttttgccttttgcaaccaggaacagcaaatgcaaaaactctttgagagggtaggagggtgggaaggaaacaaccatgtcatttcagaagttagtttgtatatattattataatcttataattgttctcagaatcccttaacagttgtatttaacagaaattgtatattgtaatttaaaataattatataactgtatttgaaataagaattcagacatctgaggttttatttcatttttcaatagcacatatggaattttgcaaagatttaatctgccaagggccgactaagagaagttgtaaagtatgtattatttacatttaatagacttacagggataaggcctgtggggggtaatccctgctttttgtgtttttttgtttgtttgtttgtttgtttttggggggttttcttgccttggttgtctggcaaggactttgtacatttgggagtttttatgagaaacttaaatgttattatctgggcttatatctggcctctgctttctcctttaattgtaaagtaaaagctataaagcagtatttttcttgacaaatggcatatgttttccacttctttgcatgcgtttaagtcagtttatacacaaaatggattttattttttagtttaactgtgtttctccgacagctcacctctctctgaccacccagccatttccttcctgtgctccacgttcttctgtgtgattaaaataagaatattatttttggaaatatgcaactccttttcagagatcaggagggatttatgtagcagctatttttactgcaaaagtaattcactggaaaaaaaatgtaatttgtaagaaagctttatttttatctcagctctatgtaaagttaaagttactgtacagagctgaaggacggggggcggtaggggtcttgatgaaacctcttgaacgaagcacagtttgtcccatctttgttcactcgtgtgtctcaaccatcttaatagcatgctgctcctttttgctcagtgtccacagcaagatgacgtgattcttattttcttggacacagactattctgaggcacagagcggggacttaagatgggaaagagaaagcatcggagccattcattcggagaaaacgttttgatcaaaatggagacttttgtagtcgtttcaaaagagcacctgagtcatgtgtattcccggcctttataaatgacccggtcaagttggtttcaaagtccgacaggcttgtctgtttactagctgcgtggccttggacgggtggctgacatctgtaaagaatcctcctgtgatgaaactgaggaatcgggtggccgggcaagctgggaagagcaaagccagagctgcgctgcctcaatacccacaaaagaccattcccagtatacataagcacaggatgtttttctcaagagggatgtatttatcacttggacatctgtttataatataaacagacatgtgactgggaacatcttgctgccaaaagaatcctaggcagtggctcattgtatgtgaggttgaaccacgtgaaattgccaatattaggctggcttttatctacaaagaaggagtttcatggggttcagcctaacagttatggaaactacagtccttataaaccattggcatggtaataaacagatcttaagtataaaaattttgtaattgggcctttactctctcaataataaagtattttgtttatataaa

SEQ ID NO: 192 - DNA, 4059 bp, Homo sapiens
atgtccaaggtaacggcgcctgggtccgggccgccggcggcggcgagcgggaaggagaagcgctccttcagcaagcggctgtttcggagcggccgcgctggcggcggcggcgcggggggccccggggcgtccgggccggccgcgccttcctcgccctcctcgccctcctctgcacgctcggtgggcagcttcatgagccgcgttctcaagacgctgtccacgctctcgcaccttagctctgagggcgccgccccagaccgcggcggcctccgcagctgcttcccgcccgggccggccgccgcgcccacgccgccgccgtgcccgccgccgcccgcctctcccgcgccgcccgcttgcgccgccgagccggtgcccggcgtggcggggctccgcaaccacggcaacacgtgcttcatgaacgccacgctgcagtgcctcagcaacaccgagctcttcgccgagtacctggcgctgggccagtaccgggcggggcggcccgagccctcgcctgacccggagcagcctgcgggccgcggcgcgcagggccagggcgaggtcactgagcagctggcgcacctggtgcgggccctctggaccctggagtacaccccgcagcacagccgcgacttcaagactattgtgtcaaagaatgcactgcagtaccggggaaattcccaacatgatgcccaggagtttctgctgtggcttttggaccgagttcatgaagacctcaaccattcagtgaagcagagtggccagcctcctctgaagccaccatcagagactgatatgatgcctgagggaccatctttccctgtctgtagcacttttgtacaagaactctttcaagcgcaatacagatcttctttgacgtgtcctcattgtcagaaacagagcaacacttttgatcctttcctttgcatttctttgccaattcctctgccccacacaaggcctctctatgtcactgtagtgtatcaaggcaaatgttctcactgcatgaggattggtgtggccgtacctctgtctgggactgtcgccagacttcgggaagcagtgtctatggaaacaaagatccccactgatcagattgtgttaacagaaatgtactatgatgggttccatcgttccttttgtgatacagacgacctggaaacagtccatgaaagcgactgcatttttgcctttgagactcccgaaatatttaggcctgaaggaattctcagtcaaagaggaattcatttaaacaacaacctaaaccacttgaaatttggcttggattatcatagactgtcttctcctacacaaacagcagcaaagcaggggaaaatggattctcccacatcaagagcaggcagcgacaagattgtcctgttggtgtgtaaccgagcctgcactgggcaacaagggaaaagatttggactgccttttgtgctgcacttagagaagacaatagcttgggaccttctgcagaaggaaatcttggagaagatgaagtatttcttgaggcccacggtttgcattcaggtgtgtccattcagcttgcgtgtggtcagtgttgttggaataacatatttgctgccccaggaggagcagcccttgtgccacccaatagtagaaagggcattaaaatcttgtggaccaggtggcactgctcatgtgaaattagtagtcgagtgggacaaggagacaagagattttccatttgtaaatactgaggatgagtatattcctgatgcagaaagtgttcgtctgcaaagggagcgtcatcatcagcctcaaacctgcactttatcccagtgtttccaactgtacaccaaagaggagcggcttgcccccgatgatgcctggcgttgcccacactgtaagcagctgcagcagggaagcattacgttaagcctctggactctgcctgatgtgcttattatacatctaaagagatttcggcaggaaggagacaggcgcatgaaacttcagaacatggtcaaattccccttgactggcctggacatgacacctcacgtggttaagaggagccagagcagctggagtttgccatcgcattggtccccgtggagacggccctatggactcgggagggaccctgaggactacatctatgacctgtatgctgtgtgcaatcaccatggcaccatgcaaggggggcactacacagcgtactgtaagaactctgtggacggcctctggtactgcttcgatgacagcgatgtgcagcagctgtcagaagatgaggtctgcacgcagacagcatacatcctcttctaccagaggcggacagccatcccgtcatggtcagccaacagctcggtggcaggctccacaagttcttccctgtgtgaacactgggtgagccggctcccgggcagcaagccagccagcgtgacctctgcagcttcctccagacgcacctccctggcgtcgctctctgagtccgtggagatgactggagaaaggagtgaagatgatggaggcttttcaactcgaccatttgtgagaagtgtccagcgtcagagtttgtcatccagatcttctgtcaccagccccttggccgtcaatgaaaattgcatgagaccttcatggtccctgtctgctaagctgcagatgcgctccaattctccatcccgattttcaggggattcgccaattcacagctctgcttccaccttggagaagattggggaggcagcagatgacaaggtctccatctcttgctttggtagcttgcggaacctttctagcagttaccaggaaccaagcgacagtcatagtcgccgtgagcacaaggctgtgggccgggcccctctggctgtcatggaaggcgtgttcaaagacgaatcggacacccgcagattgaactccagtgtcgtagatacacagagcaaacattcagcacaaggggaccgcctgcccccgctctctggtccatttgataacaataatcagatcgcttatgtggatcagagcgactccgtagacagctctccagtcaaagaggtgaaagcccccagccacccaggctcactcgcaaagaaaccagagagcacaactaagagatcccccagttccaaaggcacttctgagccagagaaaagcttgcggaaggggagaccagccttggcaagccaggagtcatccctttcaagtacatccccttcttctcctcttcctgtaaaagtctctctaaagccctcccgctcccgcagcaaagcagattcttcttccaggggcagtggacggcattcatcccctgcccctgcccaacccaaaaaggagtcatccccgaaatctcaggactccgtgtcatctccttcgccacagaagcagaagtcagcctcggccctcacctacactgcttcctccacatctgccaaaaaggcctcgggccctgccacaaggagccctttcccacctgggaagagcaggacttcagaccacagcttgagtagagagggctccagacaaagcttgggttctgacagagccagcgccacctccacctccaaacccaattcccctcgggtgagccaggcccgagcaggggagggcaggggggccgggaagcacgtgcggagctcctccatggccagcctgcgctcccccagcacaagcatcaagtctggtttgaagagggacagcaagtctgaggacaaggggctgtccttcttcaaatcagccttgagacagaaggaaacccggcgctcgacggatcttggcaagacagccttgctctctaaaaaggctggtgggagctctgttaagtctgtctgtaagaacaccggggacgacgaggcagagagaggccaccagcctccagcttcccagcagccaaatgcaaatacaacgggaaaagagcagcttgtcaccaaggaccctgcttctgccaaacattccctgctgtccgctcgcaaatccaagtcttcccaactagactctggagttccctcgtctccgggtggcaggcagtctgcagagaaatcctcaaaaaagttatcttctagcatgcaaacctctgcacggccttctcaaaaacctcagtga

SEQ ID NO: 193 - DNA, 4942 bp, Homo sapiens
gctgcggctgcggcctcccctgcgcgcagctacccgggcgtcccggcccgcggccccgctaaccccggggcccgcgcccccgcggcagggatgcatcatggccacgctggcttgccgggtgcagttcttggacgacacggaccctttcaacagcaccaacttccccgagcccagccggccgccgctgttcacgttccgcgaggacctcgcgctcggcacccagctggcgggggtccataggctgctgcaggcgccgcacaagctggatgactgtactctgcagctctctcacaatggcgcctacctggatttggaggccaccctggcagagcagcgggatgagttggaaggcttccaggatgacgccgggcggggcaagaagcacagcatcatcctaaggacgcagctgtctgtgagggtccatgcctgcatcgaaaaactatacaactccagcggacgagatttgagaagggccctcttctccctgaagcagatatttcaggatgacaaggatttggtgcatgaatttgtagtggctgaaggtctgacatgtttgatcaaggtgggagctgaggctgatcagaactatcagaactacatcttaagggctttgggccagattatgttgtatgtggatggaatgaatggagtaataaaccgcaatgaaaccattcagtggctgtacactctcattgggtcaaagttccgcctggtggtgaagacagccctgaagctgctgctcgtctttgtagagtactcggagtccaacgcacctctcctaattcaggctgtcactgctgttgacacgaaaagaggggtcaaaccttggtcaaatatcatggaaatcctggaggaaaaagatggagttgatacggagctactggtttatgcaatgactttggtgaacaagacgttatcaggactaccagaccaagacaccttctacgacgtcgtggactgcctggaggagctgggcattgctgctgtgtcccagaggcacttgaacaagaaagggactgacctggacttagtggagcaactcaacatttatgaggtggcgctcaggcacgaggatggcgatgagaccacggagccaccccccagtgggtgccgggaccggaggagggccagcgtgtgttccagtggcggaggcgagcaccggggcctggaccgcagaaggagccgcaggcactcggtgcagagcatcaagagcaccctgtcggcccccaccagtccctgctcccagtcagctcccagcttcaagcccaaccaagtgcgagatctgcgtgaaaaatacagcaattttggcaataactcttatcactcctcaagaccctcatctggatccagtgtgcccaccacccccacatcatccgtctcacccccacaggaggccaggttggaaaggtcatcaccgagtggtcttctcacatcatccttcaggcagcaccaagagtcactggcagcagagagagagaggcggcggcaggagagagaagaaaggttgcagagaatagagcgggaagaaagaaacaaattcagccgagattatttagacaaaagagaggagcaaaggcaagcaagagaagaaagatacaaatacttggaacagttggcagctgaggagcacgagaaggagctgagaagccggagtgtgagccggggcagagccgacctctccttggacctgacctcgccagcagccccagcctgcctggctcctctgagccatagcccctcatcttcagactctcaagaggctctcacggtgtctgcctcctccccaggaacccctcaccatccccaagcaagtgccggggatcctgaacccgaatcagaggcagaaccggaagcagaggcaggggcggggcaggttgctgatgaagctggccaggacatagcctctgcccacgagggtgcagagactgaagtggagcaggcactagagcaagagccggaagaaagagcctccctcagtgaaaaagagaggcagaacgagggggtgaacgagagggacaactgctctgcctccagcgtctcgtcctccagcagcacgttggagagggaggagaaggaggacaagctctccagggacaggacaactggtttgtggcccgcaggtgtccaggatgcaggtgtaaatggacagtgtggcgacatcctcaccaacaaacggttcatgcttgacatgctgtatgcccataacaggaagtctccggatgatgaggagaagggggatggggaggctgggaggacccagcaggaggcagaggcggtagccagccttgctaccaggatatccaccctgcaggccaactctcagacccaggatgagagtgtcaggagggtggatgtcggctgtttggacaatcggggcagtgtgaaagcatttgctgagaaattcaacagtggggacctggggagaggttccatctcccctgatgctgagcccaatgacaaggtcccagaaacagcgccggtgcagccgaagacagagtctgattacatctgggaccagctcatggccaatccaagagagctcagaatccaagacatggatttcactgacctgggggaggaggatgacattgatgtcctagatgtggacctgggtcacagggaggcccctgggccacctcccccacccccacccacctttctgggtttgccgcccccaccccctccgcccctgttggacagcattcctccccctcctgtccctggtaatttattggttcctcctcctccagtgttcaacgctcctcagggcttagggtggtcccaggtacccaggggtcagcccacattcactaagaaaaagaagaccatccgtttgttctggaatgaagttcggccttttgactggccatgtaaaaacaaccgacgctgcagagaattcctgtggtcaaaactggaacccattaaggtggacacttccagactggagcacctgtttgagtctaaatccaaggaactgtctgtctcaaagaaaactgctgcagatggaaaaaggcaagagatcattgttctggattccaagaggagtaacgccatcaatattggtctgacggtgctgccccctccaaggacgattaagatcgccattttgaattttgatgagtatgccttaaacaaagaaggaatcgagaaaattctaacgatgattcccaccgatgaggagaagcagaaaatccaggaagctcagctggccaaccctgaaatccccctgggcagtgcagagcagttcctcctcaccctgtcctccatcagcgagctctctgcacgacttcacctctgggcattcaaaatggattatgaaactacagaaaaggaagtagcagaaccactcctggacctgaaggaaggaatagaccagttggagaacaataaaaccttgggctttatcctgtctactctcttagccattgggaactttctaaatggaactaatgccaaagcgtttgagttaagctacctcgagaaggttccagaagtcaaagacacagtgcacaagcagtcgcttctccaccatgtgtgcaccatggtggtagaaaacttcccagacagctccgatctgtactcggagatcggggccatcaccaggtcagccaaggttgactttgatcaacttcaggataatttatgtcagatggagagaagatgcaaagcttcatgggatcacctcaaggcaattgcaaaacatgaaatgaaaccagttttaaaacaacggatgtcagagttcctgaaagactgtgcagagcgaattataattttaaagattgtccatagaaggataatcaacagattccactcctttttactctttatgggccatccaccttatgcaattcgggaagtgaacataaacaaattctgcaggattattagtgaatttgcactagagtatcgcacaaccagggaaagggttttgcagcagaaacagaaacgggccaaccacagagagagaaataagaccagagggaagatgatcaccgattctggcaagttctccggcagttctccggcgcccccaagccagccgcagggtctgagctatgcggaggacgcggctgagcacgagaacatgaaggctgtgctgaaaacctcgtccccctccgtggaggacgccacccccgcgctgggcgtccgcacacgcagccgagcaagccgaggatccactagttcctggactatgggaactgatgactcgcccaatgtcacagatgatgcagctgatgagatcatggaccgcatcgtcaagtcagccacccaagtgcccagtcagcgagtggtgccgagggagaggaaacgatcccgggccaaccggaaatctttgcgaagaaccctgaagagcggcctgaccccagaagaagccagagccctgggcttggttggcacctcggagttgcagctgtgacactcataggttactcccaggagtgtgctgagcagaaggcaagctcttgctggatgaaacccctccaggtggggttggggagacttgatattcacatccaacagtttgaaaagggagagctcaattcccagcgtcaccccatggcttgtgttgcctgctacgcattgacttggatctccaggagtcccctgcacataccttctccatcgtgtcagctgtgtttctcttgattccgtgacacccggtttattagttcaaaagtgtgacaccttttctgggcaaggaacagcccctttaaggagcaaatcacttctgtcacagttattatggtaatatgaggcaatctgattagcttcacagactgagtctccacaacaccaaaatatccagatgtaaaccccaaacttgtacacaaaagaaagcacagattgtttacctgttgtggattttagatgtaacaaatgtttatacaaatacatacatgtacaccatgtttcaaatactaaataaatagagtttaatgcc

SEQ ID NO: 194 - DNA, 2233 bp, Homo sapiens
ataaaaacattgtatatagtagaccaaatggtcatagttactgtgagcctggcagagcagaaaaggcagttgaaggaggcagagaaggggttggtgatacggtgctataaatctgtggtccagtccacctcccttttaagacgtcctccccctatttctgttcttagttagagatgcagcagcttactcctgtagcgacctactaaaaagcaacaaggagaaagacatcgtctttttgaaaaaacgttctttcgtctcttttctttgttccttggtttgtttttcttgcccctttttgtttagttgaacggcaataggagggtagtctctccgtctttttaaactcttttttaagtttcccctcccctttcatatttttttgggccatttcttttagctttggactttgggggtcgaaagcgtttctttttatttgcttcttttaagccgagcacagtttaggtttcgtgctgtcttaagagaactatccagcagcttcttgctcatccttattgggagaactgcaccgttactttaaaaacacacatacacaaaaaccttaagggagaaaggtaattgctgccatggaaacacaactgtctaatgggccaacttgcaataacacagccaatggtccaaccaccataaacaacaactgttcgtcaccagttgactctgggaacacagaagacagcaagaccaacttaatagtcaactaccttcctcagaacatgacacaggaggaactaaagagtctctttgggagcattggtgaaatagagtcctgtaagcttgtaagagacaaaataacagggcagagcttgggatatggctttgtgaactacattgaccccaaggatgcagagaaagctatcaacaccctgaatggattgagacttcaaaccaaaacaataaaagtttcctatgctcgcccaagttcagcttctatcagagatgcaaatttatatgtcagcggacttccaaaaacaatgacccagaaggagttggaacagcttttttcacaatatggacgcattattacttctcgtattcttgtcgaccaggtcactggcatatcaaggggtgtagggtttattcgatttgacaagcgaattgaggcagaagaagctatcaaaggcctaaatggccagaaacctcccggtgccacggagccaatcactgtaaagtttgctaataacccaagccaaaaaaccaatcaggccatcctttcccagctgtaccagtctccaaacagaaggtatccaggaccgctagctcagcaggcacagcgttttaggttggacaatctgctcaatatggcttatggagtaaagaggttttctccaatgaccattgacggaatgaccagtttggctggaattaatatccctgggcaccctggaacagggtggtgtatatttgtgtacaacctggctcctgacgcagatgagagtatcctgtggcaaatgtttgggccttttggagctgtcaccaatgtgaaggtcatccgtgactttaacaccaataaatgcaaaggttttggatttgtgactatgacaaactatgatgaggctgccatggcgatacgtagcctcaatggataccgtctgggagacagagtactgcaggtctcctttaagacaaacaaaacgcacaaagcctaatgagctcttgtcctcagtccatttatatatgaaaactatacaacaaaggcaagttaagagaaactttatacattagtaaatgtctttgtaagtcagtgttgagatggggataaaatgactacttagcatcctaagaaatatgtgagattttttattgctagtatttgaattaaaacttcttaaatatcttttatgttgaatatggacaagaggtacagggttttacctgtcacattgcattctattgccttctttgaagaaggtggaccttttaaagtgtttcagctaagggaagacatttcttttctttttacataactgccttgaacctgtgagtaaatattgaggctttgtgttgtaattcttcagttggttgtgtcttttttttcccccctttttcctttttctgattagctttgtgtttggtttacatttaaagcattgctgttatgtctgtttaagaaaagtattttgaagtttacatttttatttatgaagtttaaaacagtatttattttgtaattatgatttgggttggggaagggggggctacattataaacgcttagg

SEQ ID NO: 195 - DNA, 1524 bp, Homo sapiens
agcagtcctgtcatgcggaagtagcagtccggtcctagggactagcaggcaccaagaaactgataatgttcctttgaattggcttctgtatttgcttcatcaatgtctctcatactgaatatcttaagagagatgctggaatattttggcgttcctgtagaacaggttttgctgatttgggaaaataaagactatggatcaactaggagtattgttcgtattattgggaaaatgcttccactggaaccttgtcgaagacctaattttgagttgatcccgctcttgaactctgtagactctgataattgtggatctatggttccatcttttgctgatattttgtatgtggcaaatgatgaagaagccagttatctcagatttcgaaatagtatatggaaaaatgaagaagagaaagtggaaatttttcatcctttgcgactagttcgggatccactgtcacctgctgtaagacagaaagaaactgtgaaaaatgacctgcctgtaaatgaagctgcaattagaaaaatagctgcccttgaaaatgagctgacttttcttcgctctcagattgcagcaattgtggaaatgcaggaactgaaaaatagtacaaattctagttcctttggcttgagtgacgagcgcattagtttgggtcagctgtcatcatcgcgggctgcccatctgagtgtggacccagatcagcttccaggttcagtgctttctcctcctcctcctccaccacttcctcctcagttttcatctctccagccaccgtgttttcctcccgtacaaccaggatctaataatatttgtgactcagataatccagcaactgaaatgagcaaacagaacccggctgctaataagaccaattatagtcatcattcaaaaagccagagaaataaagatattccaaacatgttggacgttctaaaggatatgaataaggttaagcttcgtgcaattgagcggtcacctggcggtagacccattcataagaggaaaagacagaattcacattgggatccagtttctttaatatctcatgcacttaaacagaaatttgcatttcaagaagatgattcttttgagaaagagaatagatcttgggaatcttccccattttctagtccagaaacttcaaggtttggacatcacatttcacagtcagaaggacagcgaactaaagaagaaatggtcaacacaaaagctgttgaccaaggtatcagcaacacaagccttctaaactcaaggatttaaactcaacttaaggttgagctttaaacttccaaaacttcttcctggatgataaattattcttagaaactgatttggactgttaaaggctaaaagtagatgtatttaaagactcttcttgacacattttgcctacacttgctatgtaaatatgtatgcctgtcatttttgtttcctttgttcctttttacgtttatactctgttcttctgtacatagagcttaaaataaacattctttttgaacttgaaaaaaaaaaaaaaaaaaa

SEQ ID NO: 196 - DNA, 2205 bp, Homo sapiens
cggcggctgcaggcggcgggcaaggacggcgggcacagcgcagcactccccgctcgttggcccgggtatcccagcgcggacccacgcgatacgctgacgccccgacgccgatccggccgagccaagtaagggggacggcccgagacggagaagggagagagtgggagtttcccagcccgcagaactttcgaagttgagaaaagaacccctggaacgtgcgctcagcactgggattttctggactcaacgatgactctgaataatgtcaccatgcgccagggcactgtgggcatgcagccacagcagcagcgctggagcatcccagctgatggcaggcatctgatggtccagaaagagccccaccagtacagccaccgcaaccgccattctgctacccctgaggaccactgccgccgaagctggtcctctgactccacagactcagtcatctcctctgagtcagggaacacctactaccgagtggtgctcataggggagcagggggtgggcaagtccactctggccaacatctttgcaggtgtgcatgacagcatggacagcgactgcgaggtgctgggagaagatacatatgaacgaaccctgatggttgatggggaaagtgcaacgattatactcctggatatgtgggaaaataagggggaaaatgaatggctccatgaccactgcatgcaggtcggggacgcatacctgattgtctactcaatcacagaccgagcgagcttcgagaaggcatctgagctgcgaatccagctccgcagggcccggcagacagaggacattcccataattttggttggcaacaaaagtgacttagtgcggtgccgagaagtgtctgtatcagaagggagagcctgtgcagtggtgtttgactgcaagttcatcgagacctctgcagctgtccagcacaacgtgaaggagctgtttgagggcattgtgcgacaggtgcgccttcggcgggacagcaaggagaagaatgaacggcggctggcctaccagaaaaggaaggagagcatgcccaggaaagccaggcgcttctggggcaagatcgtggccaaaaacaacaagaatatggccttcaagctcaagtccaaatcctgccatgacctctctgtactctaggaacccagggtcacccagatgtccctttgatggccgttgttgaaggccattgggaccaataatctatattagattgaatacttaagttagatgtggtttcccccattgtagcagggagctagcgtattagccttgtgggcaacatgatgcatgggaaatgaaagatttttgtaaaaagtcagtatttatttccaggaaaagcctgaccttgctatttgaacacccaagactctttagaggatgtgtttggtgttcacatgtgtttcttctattttggatagtagagaagtaaagcttacaaagaatgcctagaacaagaacttttcatcattaaaaatttttcccagtgttctgatatgtgactttgaggccaatgagtcataaacaaatataagaaagctgtcaatgagtttcttcaaaggagggaaaactttctacgaatctaagatccatggagctagaattgtagaactaggctcatcagaatcgtgactattattgctccatcaaactgtgaaaagaaatgatgtggaccttgctggaaacaaaggcttagcaaacaatttttgttcaatgcccaccaagacatatagaattgggaactgatacatgtgtcccttataggctcaaaaattatatcttacaatttcttatttagggggaaattatttgaatcagattctatttagtcaaaccaccttttatgttttattatttttgaattcatggagccatcataaaaatatttttaaaatcagaattattgataccctgtagtgcaaaatgtcaatttttaatgtataatcagaagtctgaatttttataaaacatatagcataaaaacttccagtactttggttgacccttgtatgtcacagctctgctctatttattattattttgcaaaataaccattttaacatttgataaagcatatttatgaacatatttcttaataagaaaaatatccattttattaccattttctatctttttcaaaatatgcaagtttttacctatatgtcttataataaaagaaataaaatatttgaaaaaaaaaaaaaa

SEQ ID NO: 197 - DNA, 1317 bp, Homo sapiens
aattttgaatttttctttatggcgtgggagaggccacagcccggactccatcgactcccccggctcttagactaaaatcatgcccaagttcaaacaacgaagacgaaagctaaaagccaaagccgaaagattattcaaaaaaaaagaagcctctcactttcagtccaagctaattacacctcctcctccaccaccctcaccagaaagagtcggtatttcttcaatagatatatctcaaagcagaagctggctaacatcatcctggaacttcaattttcctaacatcagagatgcaataaaactttggacaaatagagtatggtctatatacagctggtgccagaactgcataacccagagtttagaagtattgaaagacaccatctttccatctcgtatctgccaccgagaactttacagtgtaaaacaacagttttgcattttggaaagtaaattatgcaagctccaggaagcactgaagaccatctcagaaagttcttcctgtccaagctgtggtcaaacatgtcacatgagtggtaaacttacaaatgtgcctgcctgcgttctgatcacccctggagactccaaagctgtgcttcctcccacactgccacagccagccagccattttcctcctcctcctccacctccacctctgccacctcctccaccaccactagcacctgtgttgctcagaaaacccagtctcgctaaagcacttcaggctggaccattaaaaaaagatggacccatgcagataacagttaaagatctgctgactgtaaaattaaagaagacacagagtttagatgaaaagaggaagcttataccatcgccgaaagcacggaatccactagttaccgtctctgacttgcagcatgttaccctgaaacctaactccaaagtgttatcgactcgagttacaaacgtcttaatcactcctggaaaaagtcagatggatctgcggaaactgcttagaaaagtcgatgtagagaggagcccaggtggaacccctcttaccaataaggaaaatatggaaacaggaacaggactgactccagtgatgacgcaggccttaaggagaaagtttcagctggctcaccctagaagcccaactccaactctgccactttctacaagcagctttgatgaacaaaactgatgccaactctgcctcactccatgagatgatccataacaaatacagataaaaacacccagctgggtgcagtggctcacacctgtaatcccagcactttgggaggctgaggcaggtggatcacctgaggtcaggagtttgagaccagcctggccaac

SEQ ID NO: 198 - DNA, 5189 bp, Homo sapiens
ggactgcgaaaggagcagggttgcggagctagggctccagcctgcggccgcgcattcttgcgtctggccagccgcgagctctaagggtcggccccgcccggtccgcccccgcggctccctgccaggctctcgcgggcgcgctcggggtggggcctcgcggctggcggagatgcggccggggctgcgcggtggtgatgcgagcctgctgggcggcgcgccggggcagccggagccgcgcgccgcggcgctgtaatcggacaccaagagcgctcgcccccggcctccggccactttccattcactccgaggtgcttgattgagcgacgcggagaagagctccgggtgccgcggcactgcagcgctgagattcctttacaaagaaactcagaggaccgggaagaaagaatttcacctttgcgacgtgctagaaaataaggtcgtctgggaaaaggactggagacacaagcgcatccaaccccggtagcaaactgatgacttttccgtgctgatttctttcaacctcggtattttcccttggatattaacttgcatatctgaagaaatggcattccggacaatttgcgtgttggttggagtatttatttgttctatctgtgtgaaaggatcttcccagccccaagcaagagtttatttaacatttgatgaacttcgagaaaccaagacctctgaatacttcagcctttcccaccatcctttagactacaggattttattaatggatgaagatcaggaccggatatatgtgggaagcaaagatcacattctttccctgaatattaacaatataagtcaagaagctttgagtgttttctggccagcatctacaatcaaagttgaagaatgcaaaatggctggcaaagatcccacacacggctgtgggaactttgtccgtgtaattcagactttcaatcgcacacatttgtatgtctgtgggagtggcgctttcagtcctgtctgtacttacttgaacagagggaggagatcagaggaccaagttttcatgattgactccaagtgtgaatctggaaaaggacgctgctctttcaaccccaacgtgaacacggtgtctgttatgatcaatgaggagcttttctctggaatgtatatagatttcatggggacagatgctgctatttttcgaagtttaaccaagaggaatgcggtcagaactgatcaacataattccaaatggctaagtgaacctatgtttgtagatgcacatgtcatcccagatggtactgatccaaatgatgctaaggtgtacttcttcttcaaagaaaaactgactgacaataacaggagcacgaaacagattcattccatgattgctcgaatatgtcctaatgacactggtggactgcgtagccttgtcaacaagtggaccactttcttaaaggcgaggctggtgtgctcggtaacagatgaagacggcccagaaacacactttgatgaattagaggatgtgtttctgctggaaactgataacccgaggacaacactagtgtatggcatttttacaacatcaagctcagttttcaaaggatcagccgtgtgtgtgtatcatttatctgatatacagactgtgtttaatgggccttttgcccacaaagaagggcccaatcatcagctgatttcctatcagggcagaattccatatcctcgccctggaacttgtccaggaggagcatttacacccaatatgcgaaccaccaaggagttcccagatgatgttgtcacttttattcggaaccatcctctcatgtacaattccatctacccaatccacaaaaggcctttgattgttcgtattggcactgactacaagtatacaaagatagctgtggatcgagtgaacgctgctgatgggagataccatgtcctgtttctcggaacagatcggggtactgtgcaaaaagtggttgttcttcctactaacaactctgtcagtggcgagctcattctggaggagctggaagtctttaagaatcatgctcctataacaacaatgaaaatttcatctaaaaagcaacagttgtatgtgagttccaatgaaggggtttcccaggtatctctgcaccgctgccacatctatggtacagcctgtgctgactgctgcctggcgcgggacccttattgcgcctgggatggccattcctgttccagattctacccaactgggaaacggaggagccgaagacaagatgtgagacatggaaacccactgactcaatgcagaggatttaatctaaaagcatacagaaatgcagctgaaattgtgcagtatggagtaaaaaataacaccacttttctggagtgtgcccccaagtctccgcaggcatctatcaagtggctgttacagaaagacaaagacaggaggaaagaggttaagctgaatgaacgaataatagccacttcacagggactcctgatccgctctgttcagggttctgaccaaggactttatcactgcattgctacagaaaatagtttcaagcagaccatagccaagatcaacttcaaagttttagattcagaaatggtggctgttgtgacggacaaatggtccccatggacctgggccagctctgtgagggctttacccttccacccgaaggacatcatgggggcattcagccactcagaaatgcagatgattaaccaatattgcaaagacactcggcagcaacatcagcagggagatgaatcacagaaaatgagaggggactatggcaagttaaaggccctcatcaatagtcggaaaagtagaaacaggaggaatcagttgccagagtcataatattttcttatgtgggtcttatgcttccattaacaaatgctctgtcttcaatgatcaaattttgagcaaagaaacttgtgctttaccaaggggaattactgaaaaaggtgattactcctgaagtgagttttacacgaactgaaatgagcatgcattttcttgtatgatagtgactagcactagacatgtcatggtcctcatggtgcatataaatatatttaacttaacccagattttatttatatctttattcaccttttcttcaaaatcgatatggtggctgcaaaactagaattgttgcatccctcaattgaatgagggccatatccctgtggtattcctttcctgctttggggctttagaattctaattgtcagtgattttgtatatgaaaacaagttccaaatccacagcttttacgtagtaaaagtcataaatgcatatgacagaatggctatcaaaagaaatagaaaaggaagacggcatttaaagttgtataaaaacacgagttattcataaagagaaaatgatgagtttttatggttccaatgaaatatgttggggtttttttaagattgtaaaaataatcagttactggtatctgtcactgacctttgtttccttattcaggaagataaaaatcagtaacctaccccatgaagatatttggtgggagttatatcagtgaagcagtttggtttatattcttatgttatcaccttccaaacaaaagcacttactttttttggaagttatttattttagactcaaagaatataatcttgcactactcagttattactgtttgttctcttattccctagtctgtgtggcaaattaaacaatataagaaggaaaaatttgaagtattagacttctaaataaggggtgaaatcatcagaaagaaaaatcaaagtagaaactactaattttttaagaggaatttataacaaatatggctagttttcaacttcagtactcaaattcaatgattcttccttttattaaaaccagtctcagatatcatactgatttttaagtcaacactatatattttatgatcttttcagtgtgatggcaaggtgcttgttatgtctagaaagtaagaaaacaatatgaggagacattctgtctttcaaaaggtaatggtacatacgttcactggtctctaagtgtaaaagtagtaaattttgtgatgaataaaataattatctcctaattgtatgttagaataattttattagaataatttcatactgaaattattttctccaaataaaaattagatggaaaaatgtgaaaaaaattattcatgctctcatatatattttaaaaacactacttttgcttttttatttaccttttaagacattttcatgcttccaggtaaaaacagatattgtaccatgtacctaatccaaatatcatataaacattttatttatagttaataatctatgatgaaggtaattaaagtagattatggcctttttaagtattgcagtctaaaacttcaaaaactaaaatcattgtcaaaattaatatgattattaatcagaatatcagaatatgattcactatttaaactatgataaattatgataatatatgaggaggcctcgctatagcaaaaatagttaaaatgctgacataacaccaaacttcattttttaaaaaatctgttgttccaaatgtgtataattttaaagtaatttctaaagcagtttattataatggtttgcctgcttaaaaggtataattaaacttcttttctcttctacattgacacacagaaatgtgtcaatgtaaagccaaaaccatcttctgtgtttatggccaatctattctcaaagttaaaagtaaaattgtttcagagtcacagttccctttatttcacataagcccaaactgatagacagtaacggtgtttagttttatactatatttgtgctatttaattctttctattttcacaattattaaattgtgtacactttcattacttttaaaaatgtagaaattcttcatgaacataactctgctgaatgtaaaagaaaattttttttcaaaaatgctgttaatgtatactactggtggttgattggttttattttatgtagcttgacaattcagtgacttaatatctattccatttgtattgtacataaaattttctagaaatacacttttttccaaagtgtaagtttgtgaatagattttagcatgatgaaactgtcataatggtgaatgttcaatctgtgtaagaaaacaaactaaatgtagttgtcacactaaaatttaattggatattgatgaaatcattggcctggcaaaataaaacatgttgaattccccaaaaaaaaaaaaaaaa

SEQ ID NO: 199 - DNA, 2825 bp, Homo sapiens
gcgaaattgaggtttcttggtattgcgcgtttctcttccttgctgactctccgaatggccatggactcgtcgcttcaggcccgcctgtttcccggtctcgctatcaagatccaacgcagtaatggtttaattcacagtgccaatgtaaggactgtgaacttggagaaatcctgtgtttcagtggaatgggcagaaggaggtgccacaaagggcaaagagattgattttgatgatgtggctgcaataaacccagaactcttacagcttcttcccttacatccgaaggacaatctgcccttgcaggaaaatgtaacaatccagaaacaaaaacggagatccgtcaactccaaaattcctgctccaaaagaaagtcttcgaagccgctccactcgcatgtccactgtctcagagcttcgcatcacggctcaggagaatgacatggaggtggagctgcctgcagctgcaaactcccgcaagcagttttcagttcctcctgcccccactaggccttcctgccctgcagtggctgaaataccattgaggatggtcagcgaggagatggaagagcaagtccattccatccgtggcagctcttctgcaaaccctgtgaactcagttcggaggaaatcatgtcttgtgaaggaagtggaaaaaatgaagaacaagcgagaagagaagaaggcccagaactctgaaatgagaatgaagagagctcaggagtatgacagtagttttccaaactgggaatttgcccgaatgattaaagaatttcgggctactttggaatgtcatccacttactatgactgatcctatcgaagagcacagaatatgtgtctgtgttaggaaacgcccactgaataagcaagaattggccaagaaagaaattgatgtgatttccattcctagcaagtgtctcctcttggtacatgaacccaagttgaaagtggacttaacaaagtatctggagaaccaagcattctgctttgactttgcatttgatgaaacagcttcgaatgaagttgtctacaggttcacagcaaggccactggtacagacaatctttgaaggtggaaaagcaacttgttttgcatatggccagacaggaagtggcaagacacatactatgggcggagacctctctgggaaagcccagaatgcatccaaagggatctatgccatggcctcccgggacgtcttcctcctgaagaatcaaccctgctaccggaagttgggcctggaagtctatgtgacattcttcgagatctacaatgggaagctgtttgacctgctcaacaagaaggccaagctgcgcgtgctggaggacggcaagcaacaggtgcaagtggtggggctgcaggagcatctggttaactctgctgatgatgtcatcaagatgctcgacatgggcagcgcctgcagaacctctgggcagacatttgccaactccaattcctcccgctcccacgcgtgcttccaaattattcttcgagctaaagggagaatgcatggcaagttctctttggtagatctggcagggaatgagcgaggcgcagacacttccagtgctgaccggcagacccgcatggagggcgcagaaatcaacaagagtctcttagccctgaaggagtgcatcagggccctgggacagaacaaggctcacaccccgttccgtgagagcaagctgacacaggtgctgagggactccttcattggggagaactctaggacttgcatgattgccacgatctcaccaggcataagctcctgtgaatatactttaaacaccctgagatatgcagacagggtcaaggagctgagcccccacagtgggcccagtggagagcagttgattcaaatggaaacagaagagatggaagcctgctctaacggggcgctgattccaggcaatttatccaaggaagaggaggaactgtcttcccagatgtccagctttaacgaagccatgactcagatcagggagctggaggagaaggctatggaagagctcaaggagatcatacagcaaggaccagactggcttgagctctctgagatgaccgagcagccagactatgacctggagacctttgtgaacaaagcggaatctgctctggcccagcaagccaagcatttctcagccctgcgagatgtcatcaaggccttacgcctggccatgcagctggaagagcaggctagcagacaaataagcagcaagaaacggccccagtgacgactgcaaataaaaatctgtttggtttgacacccagcctcttccctggccctccccagagaactttgggtacctggtgggtctaggcagggtctgagctgggacaggttctggtaaatgccaagtatgggggcatctgggcccagggcagctggggagggggtcagagtgacatgggacactccttttctgttcctcagttgtcgccctcacgagaggaaggagctcttagttacccttttgtgttgcccttctttccatcaaggggaatgttctcagcatagagctttctccgcagcatcctgcctgcgtggactggctgctaatggagagctccctggggttgtcctggctctggggagagagacggagcctttagtacagctatctgctggctctaaaccttctacgcctttgggccgagcactgaatgtcttgtactttaaaaaaatgtttctgagacctctttctactttactgtctccctagagtcctagaggatccctactgttttctgttttatgtgtttatacattgtatgtaacaataaagagaaaaaataaaaaaaaaaaaaaaaaaaaaaaaaaaaaaaa

SEQ ID NO: 200 - DNA, 5662 bp, Homo sapiens
ggtcgccggccagcgtgaaccgggacatggagccgcccggcgggagcctggggcccggccgcgggacccgggacaagaagaagggccggagcccagatgagctgccctcggcgggcggcgacggcggcaaatctaagaaatttctggagagatttaccagcatgagaattaagaaggagaaggaaaagcccaattctgctcatagaaattcttctgcatcatatggggatgatcccacagcacagtcattgcaagatgtttcagatgaacaagtgctggttctctttgaacagatgctgctggatatgaacctgaatgaggagaaacagcaacctttgagggagaaggacatcatcatcaagagggagatggtgtcccaatacttgtacacctccaaggctggcatgagccagaaggagagctctaagtctgccatgatgtatattcaggagttgaggtcaggcttgcgggatatgcctctgctcagctgcctggagtcccttcgtgtgtctctcaacaacaaccctgtcagttgggtgcaaacatttggtgctgaaggcttggcctccttattggacattcttaaacgacttcatgatgagaaagaagagactgctgggagttacgatagccggaacaagcatgagatcattcgctgcttgaaagcttttatgaacaacaagtttggaatcaagaccatgttggagacagaagaaggaatcctactgctggtcagagccatggatcctgctgttcccaacatgatgattgatgcagctaagctgctttctgctctttgtattctaccgcagccagaggacatgaatgaaagggttttggaggcaatgacagaaagagctgagatggatgaagtggaacgtttccagccgctgctggatggattaaaaagtggaaccactattgcactgaaggttggatgcctacagctgatcaatgctctcatcacaccagcggaggaacttgacttccgagttcacatcagaagtgaactgatgcgtttggggctacatcaggtgttgcaggaccttcgagagattgaaaatgaagatatgagagtgcaactaaatgtgtttgatgaacaaggggaagaggattcctatgacctgaagggacggctggatgacattcgcatggagatggatgactttaatgaagtctttcagattctcttaaacacagtgaaggattcaaaggcagagccacacttcctttccatcctgcagcacttactcttggtccgaaatgactatgaggccagacctcagtactataagttgattgaagaatgtatttcccagatagttctgcacaagaacggggctgatcctgacttcaagtgccggcacctccagattgagattgagggattaattgatcaaatgattgataagacaaaggtggagaaatctgaagccaaagctgcagagctggaaaagaagttggactcagagttaacagcccgacatgagctacaggtggaaatgaaaaagatggaaagtgactttgagcagaagcttcaagatcttcagggagaaaaagatgcactgcattctgaaaagcagcaaattgccacagagaaacaggacctggaagcagaggtgtcccagctcacaggagaggttgccaagctgacaaaggaactggaagatgccaagaaagaaatggcttccctctctgcggcagctattactgtacctccttctgttcctagtcgtgctcctgttccccctgcccctcctttacctggtgactctggcactattattccaccaccacctgctcctggggatagtaccactcctcctcctcctcctcctcctcctcctcctccacctcctttacctggaggtactgctatctctccaccccctcctttgtctggggatgctaccatccctccaccccctcctttgcctgagggtgttggcatcccttcaccctcttctttgcctggaggtactgccatccccccacctcctcctttgcctgggagtgctagaatccccccaccaccacctcctttgcctgggagtgctggaattccccccccacctcctcccttgcctggagaagcaggaatgccacctcctcctccccctcttcctggtggtcctggaatccctccacctcctccatttcccggaggccctggcattcctccacctccacccggaatgggtatgcctccacctcccccatttggatttggagttcctgcagccccagttctgccatttggattaacccccaaaaagctttataagccagaggtgcagctccggaggccaaactggtccaagcttgtggctgaggacctctcccaggactgcttctggacaaaggtgaaggaggaccgctttgagaacaatgaacttttcgccaaacttacccttaccttctctgcccagaccaagaccaagaaggatcaagaaggtggagaagaaaagaaatctgtgcaaaagaaaaaagtaaaagagttaaaggtgttggattcaaagacagcccagaatctctcaatctttttgggttccttccgcatgccctatcaagagattaagaatgtcatcctggaggtgaatgaggctgttctgactgagtctatgatccagaacctcattaagcaaatgccagagccagagcagttaaaaatgctttctgaactgaaggatgaatatgatgacctggctgagtcagagcagtttggcgtggtgatgggcactgtgccccgactgcggcctcgcctcaatgccattctcttcaagctacaattcagcgagcaagtggagaatatcaagccagagattgtgtctgtcactgctgcatgtgaggagttacgtaagagtgagagcttttccaatctcctagagattaccttgcttgttggaaattacatgaatgctggctccagaaatgctggtgcttttggcttcaatatcagcttcctctgtaagcttcgagacaccaagtccacagatcagaagatgacgttgttacacttcttggctgagttgtgtgagaatgactatcccgatgtcctcaagtttccagacgagcttgcccatgtggagaaagccagccgagtttctgctgaaaacttgcaaaagaacctagatcagatgaagaaacaaatttctgatgtggaacgtgatgttcagaatttcccagctgccacagatgaaaaagacaagtttgttgaaaaaatgaccagctttgtgaaggatgcacaggaacagtataacaagctgcggatgatgcattctaacatggagaccctctataaggagctgggcgagtacttcctctttgaccccaagaagttgtctgttgaagaatttttcatggatcttcacaattttcggaatatgtttttgcaagcagtcaaggagaaccagaagcggcgggagacagaagaaaagatgaggcgagcaaaactagccaaggagaaggcagagaaggagcggctagagaagcagcagaagagagagcaactcatagacatgaatgcagagggcgatgagacaggtgtgatggacagtcttctagaagccctgcagtcaggggcagcattccgacggaagagagggccccgtcaagccaacaggaaggccgggtgtgcagtcacatctctgctagcttcggagctgaccaaggatgatgccatggctgctgttcctgccaaggtgtccaagaacagtgagacattccccacaatccttgaggaagccaaggagttggttggccgtgcaagctaatgtgggtcctgtgaccgcggcagctcctcagcggagccgcagactgtcctgccctgcagcatgtgcctaaaggctcaaggggatattcctctggggtggccactcccaccaccctgaccctgtctttctctctggcctgctgctctctcaacatcacatacagcttcagctgcctggaggccagaaggaaagggcagtgcaggggaggcctgagcccgacttagccagccctggctgttgtattaccaaagcagggtccatgtttgctgccttaaccctgtctcctctctgttactcagagggcctcatctcagacaaggcccagcctgctttttctcagccctgactttctaatgggctttcccccctaggtcagtcttgctggatttgtgcttttcttttgtggtttctctggccctgagaatagcatggggcttgtaaacctttgggctagatccctcctttcattgctgttgtctctgctcttccctctcctggctgtggttatttattattagtggtgtggcactgggagctgctcctaaggaagcagggagcaaatcccacctttaccccaccttcctgggaaaggcctccaaagcaaaggatctggaccagtttccctgctgtgctgtggcccaggccagagcctgtgggcaggcaggcagggcatagcgacagtgtgggacctgcccccagcttctgccacgctttatgcccttgcctctctggacgctctgcaccaaccccaggctactgagccaccttccctcctcatgccttccctgagctttggtgcatctcatctggactatgggttgtactgtgaccatcccaacacctcaccctctgtctacaaggaaatgggaggtggagggttgtactgtgaccatcccaacacctcaccctctgtctacaaggaaatgggaggtggagcctcctggctgagaaattgttttgcaaatggatctatttttgtatgaaaaaaaaaatttttttaaagaaaactgttccttccccctttcccctccataatgtaagaagctttggtggcaggttacagagttctgggatttcttctcacaggcccaatcctgaatgtgcccctggaccttctggacccttgagtccaaggcagatcctctctcccagggaatccgacacaggaggaaccccttctctggttgagctgggccaggcctaagagtagcaggaactctaagaccacagagttttttataaatgtataaatgtatcaagccaaatgtgcagatgctaactggacattctggggaactgggcaccaggagtgccttcatacactgtaccccagctctcttctaaaagagaagtgggtgggcacactgaactgtttggtggccccaaccacaggaagctgcaattctctggcttagggtgatacttttgccctccttgtgcccctctcagctttccatccccagctaggaagaaagaatggcactcttgggcttggcccagaattagagttattagagcaagagagagcttaggaagcatgagggcaactatagtgaggccttattgccaggagggagggttttggttgctggcgcttgtgtataaaggggcaagagcagctcctttggactattcctgggaggactctgatgcagggcgtctgttgctcccctgggtcacctcctccctgctcgctgacatctggggctttgaccctttcttttttaatctacttttgctaagatgcatttaataaaaaaaaagagagagagagagaggtgtgagggacaaaatgcaaacctatttcccttgcctcataggcttctgggatgtcatcacctccagtttgttggttttgtttccaactgttaataaagcattgaaacagt

SEQ ID NO: 201 - DNA, 3224 bp, Homo sapiens
agcggtaaatttgaaatggctgacgggtcgctgacgggcggcggtctggaggcagcggccatggcgccggagcgcacgggctgggcggtggagcaggagctggcgtctctggagaaaggtttgttccaagatgaagattcatgcagtgattgtagctaccgtgataaaccaggttctagtttacaaagttttatgccagaaggaaaaacctttttcccagaaattttccaaacaaatcaacttttgttctatgagcgattcagagcctatcaagattacattttagctgactgcaaggcctctgaggtacaggaattcacagctgagttcttggagaaggtccttgagccatctggatggcgggcagtctggcacactaatgtgttcaaggtgctggttgagatcacagatgtggactttgcagccttgaaggcagtggtgaggcttgctgaaccatacctctgtgactctcaagtgagcacttttaccatggagtgcatgaaggagctccttgatctgaaggagcatcggttgcccctgcaggagctgtgggtggtgtttgatgattcaggagtgtttgaccagacagcccttgcaattgagcatgtcagatttttctaccaaaacatttggaggagttgggatgaagaagaggaggatgaatacgattattttgtcagatgtgttgaacctcgattaagattgcattatgacattcttgaagaccgagttccatcaggacttattgttgactaccacaatctgttgtctcaatgtgaggagagttacaggaaatttttaaatctgagaagcagtttgtcaaattgtaactctgattccgagcaggaaaatatctccatggtggaagggttaaaattgtattcggagatggaacagttgaaacaaaagctgaaactcattgagaatcctttgttgaggtatgtgtttggttatcagaagaattctaacatccaagcaaagggtgtccgttccagcggtcagaagatcactcatgtggtctcctccaccatgatggctggtctcctgcggtccctgcttacggacaggctttgccaggagcctggtgaggaagaaagagaaattcagttccatagtgatccattgtctgctataaatgcctgcttcgaaggtgacactgttattgtttgtcctggccattatgtggtacatggcactttctccattgctgactccattgagttggaaggatatggcctaccagatgacattgtgatagaaaagaggggcaaaggcgacacttttgtggactgcactggtgctgatattaaaatctcaggcataaaatttgttcagcatgatgctgtagagggaatcttaattgttcaccgtggtaagactacgctggaaaactgtgtgctgcagtgtgagacgaccggagtcacagtgcggacatcagcagagtttctaatgaagaactcggatttatatggcgccaagggtgctggtatagaaatctaccctgggagtcagtgcaccctgagtgacaatgggatccatcactgcaaggaagggatcctcattaaggacttcttagatgaacattatgacattcccaagatatccatggtgaataatataatacataataatgaaggttatggtgttgtcttggtgaaacctacaatcttctctgacctgcaagaaagtgctgaagatggaactgaagaaaataaagcgcttaaaattcagacaagtggagagccagatgtggctgaaagagtggatctagaagagctgattgagtgtgcaactggtaaaatggagctttgtgcaagaactgacccttctgagcaagtcgagggaaattgtgaaattgtaaatgaactaattgctgcctccacacagaaaggccagataaagaagaaaaggttgagtgaactggggatcacgcaagctgatgacaacttaatgtcacaggagatgtttgttgggattgtggggaaccagttcaagtggaatgggaaaggtagttttggcacatttcttttctgactacagtgatgtaagtagatagcaaaatactggattttgcacatgctgccctaagaatcactgctgccattgtagtttgctgtattgtctgtattttatatttgattatttgggcttgagtgaaaggtagatttatttccatttgcaggtgttgcacataaaacactccctctttataagaaaaatcataaatgcatataaaatagaaaatatttggagattgcttatctgaaagtcttgctttcttatacacatggttctctcatattaagcctggtggtaactttttagtgtaattacctttagcacttcaaagacgaggaagtaaggaagggaatgcaagactagtgcataaaaatgcaataggtgtcatatgtacagcattcttcttagagttgccttttcatcccaattacagtgagtctgatttccatcctgtatttgcataatacttgtcttaaaataaaagcttttatgattgggaatttatctgcctaatcagacttattattgagacgtcaatgggacgcatttttctgttgagctatgcagtcgtcaaaacagcgatagacagcataggaggtttgaagcagaaatgaaatgtgttattcagagccaatgttgtacatagagcattttcactattgctgaatgggaatgattaaaaacaaggtatttttcgggccaggcggtggctcacgcttgtaatcgcagcactttgggaggctgaggcaggaggatcacttgagcccaggagttcaagactagcctaggcaacatagtgagaccctgtctctactaaaaataaatttaaaaaaaattagctgagtgtggtggtgcatgcatgtagttccagctactcaggaggctgaggctagaggatccttgagcccaggaggttgaggctgcagtgaggtgtgattgcgccactgcattccagcttgggcgacagagcgagacccagtctcaaaaaaaaaaaaagtatttttctcttaccgttacagtattctgattatattactgacacagtcaaaatgattaactgtacaacctgtatctgctgggtgttcttgttatcatattgtaaaacagctttaaaaatatttatattttaaaaactgtatgtgacattaatatgcctaatgattaaaattatagtgatgaaataacaaagaaaaaaaaaaaaaaaa

SEQ ID NO: 202 - DNA, 2483 bp, Homo sapiens
tcgtcggagcgcggctcagcggcgcggcggagactcggcacggcggcggccaggcgcaggcgggcgggcggagcagcggacggcgccgaggccgccccacgcgccgggctcgcggcggcgcagcgcgccggagtggtcggggcccgcggccgctcgcgcctctcgatgggcagctcgcacttgctcaacaagggcctgccgcttgtaagactttgaccccgacgcaggcttcagtgattgccgcggatcagaagcctgagcactttggctcgagacaattaaggacgtgggatgaggctccgagacaggacgcggttctgcctggggatcctgaagataaaaagctttgaaaagtcgaattcatggtcgtggaagctgagcccatattaagagatgtcaggcgtccgacctccgatcatgaacgggcccctgcacccgcggcccctggtggcattgctggatggccgggactgcacagtggagatgcccatcctgaaggacgtggccactgtggccttctgcgacgcgcagtccacgcaggagatccatgagaaggtcctgaacgaggctgtgggggccctgatgtaccacaccatcactctcaccagggaggacctggagaagttcaaagccctccgcatcatcgtccggattggcagtggttttgacaacatcgacatcaagtcggccggggatttaggcattgccgtctgcaacgtgcccgcggcgtctgtggaggagacggccgactcgacgctgtgccacatcctgaacctgtaccggcgggccacctggctgcaccaggcgctgcgggagggcacacgagtccagagcgtcgagcagatccgcgaggtggcgtccggcgctgccaggatccgcggggagaccttgggcatcatcggacttggtcgcgtggggcaggcagtggcgctgcgggccaaggccttcggcttcaacgtgctcttctacgacccttacttgtcggatggcgtggagcgggcgctggggctgcagcgtgtcagcaccctgcaggacctgctcttccacagcgactgcgtgaccctgcactgcggcctcaacgagcacaaccaccacctcatcaacgacttcaccgtcaagcagatgagacaaggggccttcctggtgaacacagcccggggtggcctggtggatgagaaggcgctggcccaggccctgaaggagggccggatccgcggcgcggccctggatgtgcacgagtcggaacccttcagctttagccagggccctctgaaggatgcacccaacctcatctgcaccccccatgctgcatggtacagcgagcaggcatccatcgagatgcgagaggaggcggcacgggagatccgcagagccatcacaggccggatcccagacagcctgaagaactgtgtcaacaaggaccatctgacagccgccacccactgggccagcatggaccccgccgtcgtgcaccctgagctcaatggggctgcctataggtaccctccgggcgtggtgggcgtggcccccactggcatcccagctgctgtggaaggtatcgtccccagcgccatgtccctgtcccacggcctgccccctgtggcccacccgccccacgccccttctcctggccaaaccgtcaagcccgaggcggatagagaccacgccagtgaccagttgtagcccgggaggagctctccagcctcggcgcctgggcagagggcccggaaaccctcggaccagagtgtgtggaggaggcatctgtgtggtggccctggcactgcagagactggtccgggctgtcaggaggcgggagggggcagcgctgggcctcgtgtcgcttgtcgtcgtccgtcctgtgggcgctctgccctgtgtccttcgcgttcctcgttaagcagaagaagtcagtagttattctcccatgaacgttcttgtctgtgtacagtttttagaacattacaaaggatctgtttgcttagctgtcaacaaaaagaaaacctgaaggagcatttggaagtcaatttgaggtttttttttttgttttttttttttttgtatgttggaacgtgccccagaatgaggcagttggcaaacttctcaggacaatgaatccttcccgtttttctttttatgccacacagtgcattgttttttctacctgcttgtcttatttttagaataatttagaaaaacaaaacaaaggctgtttttcctaattttggcatgaacccccccttgttccaaatgaagacggcatcacgaagcagctccaaaaggaaaagcttgggcggtgcccagcgtgcccgctgcccatcgacgtctgtcctggggacgtggagggtggcagcgtccccgcctgcaccagtgccgtcctgctgatgtggtaggctagcaatattttggttaaaatcatgtttgtgactgtaaccatttgtatgaattattttaaagaaataaaaatcctggaaagagccagcgtg

SEQ ID NO: 203 - DNA, 10396 bp, Homo sapiens
cgggcctgggctgtggctgtgactggcgctgccgtgggcgccgcagccctcgcgggagccggacgcggtaatgccccagcggcgcagcgggcggctgcgtccctgagccgctatataagcgcggcagggaacatccggaggggctgaagatgaaggtgcccgcgcatgggcccccgctgattgccagtccctcccgaccccgcgccccgcgcggagcccgaggccgccgaggacccgccttcgccgcagtagcagctggagcagcgacagaggcggcagctgcggcggcggcggcgcccgcgcccctcgcgccagcgcgtagagcggcggcggcagctcgggggccgccactgccccggctgccatgagttgtgcggaggtgatgtatcacccccagccttatggagcgtcccagtatctgcccaaccccatggcagcgacaacctgccccacagcctactatcagccggcgccccaacctggccagcagaagaagttagcggtattcagcaagatgcaggactctctggaagtcacccttcccagcaaacaagaggaggaggatgaggaggaggaggaggaggagaaagaccagcctgccgagatggagtaccttaactctcgctgtgtccttttcacttatttccagggagacattgggtcagtagtggatgaacacttctcaagagctttgggccaagccatcaccctccatccagaatctgccatttcaaaaagcaagatggggctaacccccctatggcgagacagctcagctctctcaagccagcggaatagtttcccaacttccttttggaccagctcttaccagcccccacctgcaccttgtttggggggagttcatcctgacttccaggtcactggaccccctggcaccttttctgcagctgatcccagtccttggccgggacacaacctgcatcagactggcccagcccctccccctgctgtgtctgagtcctggccttatcctttgacatctcaggtgagcccatcctacagccatatgcatgacgtgtacatgcggcaccaccaccctcatgcccacatgcaccaccgccaccgccaccatcatcaccatcaccaccctcctgctggctctgccctggatccatcctatgggcctctgctgatgccttcagtgcatgcggccaggattcctgctccccagtgtgacatcacaaagacagaaccaactacagtcacctctgctacctcagcatgggctggagcctttcatggaacagtagacatagtgcccagcgtgggattcgatacaggtctacagcatcaagacaagagtaaggaatcaccgtggtactgaaacacacaatcttagtgagttaagttgcagcataaatccaagggcccactgggaaaagatactgtcgggtttttccattcagcaataggacacgaaaggcatagaaggagaagacaaagtgtcacgcagttgactggttttcggcctttcttgagaaagcaaagtgggtcccagacattgaagaaaagcatttttatttgtttatttcctcatctgagcctttgccaactgtgcaactctctccttttgttatcttgcttttatcaatatatagctaagtttttgtttcattttgatttttttttttagccaaccaccttgtcaggaaaggatgaaccacacattaaaatgttcattctttcaggaatacaagtttgtagctctatgtgcatctatttttgtagaaatacaaaaagtttggtttagcattgatgggctatttttgagggatgtattttttttaaaattgtaaaaattgttgagttctgtttaaagaacttgctctcagagaagcactggcaaaaatgtttaaaatgcttatctctaagatgtctattatatgctctgtctgtgctttctaggttacctcaaatgttttgtttttttccttcttacaaaagtagctataccgtagtcaaaccaatgcagtattgtttttacattgaatctcagtaaagatttaattccatgctagctcaattagttttgaattatatgtatagcttgaaaagtttttttttaatgactgtgctaaagaaatgatattttattgctttgatttctcccaaagaataacttggaggttgactaataagaaagttggcataaactttcaatcaaatgaagagtttgcctagaggagactaattctctttctagcccatccaaatttgataaatggaaccagaggttatatacaactacaaggaaaaaaatgcatttaaccatgccacctatgagtgccagtgacttattttacttgtttttaattattcattcatggcaatttaaaaagtcatattttaagtgggatttgtttttcctgaagggcatttgaaggaacaatatctgggaaggtactagagaaattacaaagcccgagctctttcttataatgccacctatccctgtaagctaaacaaacaaacaaacaaacaaacaaacagttctatatataatagtttcaacacagaacttaacaagtctctttttttgtttgtttaaatctggctttacttgatttaattcctttttagaaagaaatttagggcaaaataaagtgtatattaggatttaaatttatgccacaatttaaaaataaaaccagaggttatatacaatttaaattgggctaaaaattaaaaatttgaggatttaacttgatatagctctcaggatctaaataaagtttaaattatcattaagacactgctaggagaagattaagattatgaaagtaacagttattgatactgctggacttcaaaggcaaagttcatttcttccattaactgcttccagagatgtcatgtaaaaaagttagtgtattagagaagttttttagctttataaagaggttttttcaaatttctcccatttttctctccacccacataaaatagtatgttcagtgaaatgccactttctatctttaattgttcgtatcatatatgcgaactttttagacatgaacatgacatgttcagctaggcagagttctcatagataattttcaaatattttccttggctgtaatttatgtattcatttatatcctatccgtcttttgagcttcagatctatatactcttttgtactctcatcactccgcactttgctgtttcttacctagactctcttttacacaatatgcacatttttaccattgtggggtccaaatttaagataccttccactcactaataatatgaacttatatttcctgggagtagccaggttaaattttctatactttggtccataatttgatttgatatgattgtttcatttataatttgcccaaatacatggagcacaaaatttagtgaatttataaatctggatttgccttgtgtccttctgagttttcaaaggcaagtattcaacagtccctgtgtgatgactgacagggttatttgcctcatccacatccaccttcggaatacattaacttcctttgtaatttatttgaaagtagtgttaaactcattcagatcattcagttggattttcccaatgaagaggaaaaggaaagtagttattcctagctccatttcttattttccaccaaatttaattgaagggcattaattagatgtcttcaccctgaatttagactttgctctgtgttctcccggtaactgtcagacaaaaagtttattggctctgaggaactgagaaatgttgggaacctggtttctgctgtacacaggaaagatttgtaagtgagctctctctttgaaaacaggacccaggctgggcacagcagctcatgcctgtaatcctagtattataggaggcagaggctcgggaggattgcttgagcccaggagttcaagatcagcctaggcaacatagggagaccctatccctacaaaaaatttctgaaaaattacctgggcattgtggggcacacctgttgtcccagctactctggaggctgagtccggaggaacgtttgagcctgggagtttgagtttgcagcttgcagtgagctgtgattgcaccactgtactccagcttgggcaacagagcaagatcctgtctcaaaaggaaaaagaaaacaggacctaggtgtttggggtacactgccacccagggagtggatcaaaaatatacatagaaagagaatgagcatgtctctataattgtcttctaggaccatattgctgttagaagtcctaaaagaggatgggttgtaatttagcataatattctgaattcattccaagtttaaaatcctgtcattctctggctcttcttttttcacatcaaaatgatgctgttggacttagaggcttccgaactgttttattgagggctactatctgcctccacaattttattaaaaccactccacctttagacaaaggtgacttttgtctgattttacaaatcagattttattcaagctttctaaatatctgtgaagtagaccctagaaaattgtctcgtttattttaaatagaatctatgcttccaccaataaaccatcgggagctaagaaacaacataatgttgacaaatcaggaacctaacagattattttgtctctcattattaatttgaaagagcctctaaacttttgagaaatcaatgtgtcttcttaagaaagttaagcaccctctcttaactttcccctctatttgctctcctttttctttcttcttaagagtatttatattattttgttaagcaaaaatggctaagattgctctaaaatttgcaaaatgaggagtggattgcaaataattgagggatttatttctttaactttataagactttaaaaaaaaaacccaaattctaagcactgacatgaaagttgcctttgagaagcttgttattcattatacaaaaagtatttgcccattcctattctaagatttgcagaatatgtcaccctatctagcttttgagtttgctatctggtttaatgttgtatttataatttaaagtggaaatcagaaactgtttcaagaacctgtattctattccttactgagtgtcccttctttaaatagtgtttgctgaattaagccgatgggggcagtggcgttaagtggtggaaaaaggaaagtatatatgttagagttttgaatgagggataaatagaaagcagaatgaattaatggaaaagaactcggctgttaggccattctctaaattctagtttagccaaaagtttatgtgtggtttggggcttcatttatttatctcatgagtaaaatggaataatacctaacaggcaggctctggaagttggaaatcacatacacacacacacacacacagacacacacacacacgatcaatcatgtagctcatattagatgttcaataaataacagctactacagatgcctatcagttgagtaagtagttcattaaattgagctcccaaaggtctcttctcttcacatccatatccgtttctgcagcaatcaaatagatacatgattgtttttctgtaagaaattactgcaaagagaatctttttctcctactaactgttccttctacctggtataggagataaatgtacgtttcttaattagctgactttttagtatgtcatttctgaaggaaaaataaattaaccttaaagtggcatgtaggtccaattcagttttcctacatgttccaaaattttatttaaattactgtgtccaaaattatgaggacagtgtcattcattcaccatagtttatatttttagttatatatcaaacttccttggcacctaggataagaacatttcttttgaagttatccaatttttttttatttttacttgacttgaaggaaagttggaaaatatggtggaaaaaatcttccgcattaaaagggggaaaaacacaaccatttacgatctcagtcagcagatttactctactcaaggaaaaaaagaaacaatcttattggaagcagatgttgacactgtgtcagttattgaagacggaaggagttcacttgagccattgcagttacaaaggggtattgatggcagtttggattcctgattgatcacctttgcagccaagggaaagacagcagaaactgtatgggatcagaaatgaaatcagcctgccagtttaatggagaggctcctagaaactcattttttttctttcctgtaagataaaagacatctttcagaataagaaaggcttgtttgagagagaaattacagtttattctctgaaaatatttaaaggccaaagtgccctttaaatctattattaaagcattgaaactgttattaaaatcattatagaaaaattaggtaaaaattttagcctaactttcaacatccattcaaaaacgaatgttgaaaacaaacatataacctataaaaaagtgaatggctctggcaagtgggggcatgggtggagtccataaggaaacctcagtctcaataacttcaaaatgttacttttcatggtaacttggtcatggagattggtcacagcacagacatttagaattttttagcaggttttttttttcttttgaatcttgtagtgctctctgggaattgcaccatgtacacttttacaacctacagaaatcgtcattattgttaaagtatctcaacttttctatttcttttattgtctattgtgcttttttgtttaaaaatacttttatagttttaaagtattggtcaaagtagtattctcttgaagttctagtcaatttaatttgatccaataagtttttctgaatctcctttttaagttccaagaaattctattataaataagtgtacttttaccaattccattgtataagcaaacagacaccttttagaaaaggataagtaatcatcaatttgtttttttaaaaaaaaaaacaatttctagactactaaatttggcataagaataattcttttaaaatgcaacatactttaattagtttttttggtatatgcataagatgtgaactttcctattgatatcactttatattaatagagatgtacatttctttctatgccgtggctagagcaaaagttaataatgattatttacacaattgatttaatttcttaggatatgtataatattggatattatatctgatttaaaaatactattccatacattttttttttcaggagataaaacatagggaaaggttttcatgtgaattctttgtatcactttgaagtacatatatttaaagggaagatggatacaatttgtttttattatataaatctaggtaaggtgaaatgcttttgtcaacaaaaatacagtgtagtgaattttatatttgtcacttgattaggtaaactgaaaactaacaatagaaatattattttactgcattgaaataccatgaactttcagacttgttagttctacaagaagttgtgctaccttaattttgtgtttccagaaataaaaattaaccttagttatgctgtcatttttaactaataaaaaaagtataattcataaaacttttggctttataagataattataaaattatatatttttttctgtttttgtggggttgggaaaacattttcttatttctattcactcttcaaatgcaggtctcataatatgtgtcaatgatataagatgatggaagactttgtaataaaaacatatgtcattatcttcaatttgttcaataaataatttaatgtgaattgaatgtttgtattttaacatagcatttggatttggtctgcatttcttgagaatttaaagctctttttgtttcctccttattcaattaagcatcttataaatattttggaaattacaacatcttaggtgttattaattaagaagttaatttctagggccaagaagtctatatgttacagcaaggaatagattataaaatacatgtttataatggaaaagaaaatgaaatggggtatattaattacataacagcaagagtcttgagaattttataatacaatgcttctaaggatattggttgaccaaggtgtattttattgtttttacatttgttgacagggactctgccataagtagtatgaaaaaacaaacaaaaacttttctacgattcattaacattgaaaagagaattccaagaccttgtattctgaagaaagctagagtttctctaagtgggccttcaattttcttattacacgtatctttaatgtgaaagtactaaagtctgaaaatcagcatttaaataatagactttccagcattacagatgaaataatttggcgcaggctttttaactgtctaccatatttagaatgtggtgtcaaaatgagatttttagaactgctgtaaaatattactacattactacaacgataacggcctaaaacaacacaaatttattatcttacagctctgtcagtcagacattcagcaaagatcttagtcttggtgggctacagaatgtaggaggcatttcctggatgcttccaagagagaatcttgctgttccctgcttctagagtcctttgcttagtttccttccatcttcaaatccagcaacctggtcaagaccttctcacatgacatcactgacttcctcttcttcctctcccttacatatttaaggactcatgtgattacaatagctgcatctgtgtaatccagaataatctcttcatctcaaggtttttgttctgttttgtttttttgttttgttttgttttgttttgttttgatggagtcttgctctgtcgtcaggctggagtgcagtggcgcgatctcggctcactccaacctccacctcccgggttcaaaggattcccctgcctcagcctctcgagtagctgggactacagatgcgtgctaccacacaaggctaatattttgtattttagtagagacgggatttcaccatgttggccaggatggtctccgtctcctgacctcgtgatctgcctgccttggcctcccaaagtgttgggattacaggcataagccattgcgccatgctcaaggttcttaattacatctttaaaggccctttttccatgtacagtaacatattcaatggttctggggattaggacttggagccattattctacctacaacaattagtattggacttccatcattttctatcactcttgtaatcgagaaggactatttcactgggagtagcaagtcataatgtttgcgttggcatttgtgtgggggtttatcttcattcattaaataattgcatgtaaagaaaattcctgtcactatttcaaatgtttcatgtagttattatagtgcttcagaatccaaagggttatgtgttacttatgtaagatgagcagtctagggggtggagaacaggtcatctagtgcagattcttcctagctgaagtgtgttttctctggggacaaccaagtaggatttaattgttttgcttccttttttgggaacttagacccatcttgcgatgtcctaagtctccaagcatcttatttgacctgcttatacacatttgactaaatagctaaatatgaccacattgacgtggtaaagctttaacacttttgtccagattgaatcactccatctgctatcagttaagcagtggaaaactgttatggaaaagcaaacatgttttgatagatttaatgtgtaaagaaggtatccatactctggaatgctgctgatcaataaatgagctgcaagactttgttcgaaacaacactcaagcacaactgttttactttccataccaagtttggctgtgactgaatgaagaacatcagcattgatctttgctttgcacttgtacaagagactatttgcagagagccaaatatagcaacagaggatttaatatcttgccaaaaaatacaaaatctgttcccctttaagcatgacactctatcctttcttgtggatcttgctaaaaggaaaatatagctttaaactcccctattccttctgttgaaagcttaagaatctttttcaaatgagctatgtatggttttgtggtattttatgtttccaaaagaaaatggctacatgaaaaatctgtccagtgttatcatttttcttacaaaaaatacttctagttatggttgtattaattaatttgattgtgataatgattacacaatgtttacctatatcaaatcatcatatcgtataccttaaatatatataacttttatgtgtcaattataactcagtaagtctgggaaaatatcgttaagtcaaagattagagtcaacagaaataaagaaaaatcatactttgataacttcaggactaatcaaggatcaatgggtgacatgatatcatgctatgtgccattttgtgttaaacaaattacaccaacaataaaaaaaattggcttcaa

SEQ ID NO: 204 - DNA, 8636 bp, Homo sapiens
agtcggaagttgcctgagcagatcccagccggctggctcgagtggccttcgtcgtcccttggcgccctgggagagtcgctgacgggtggactgacggaccgcctgaggacggccggccagggcggtgaaagcgccagccctatggcgcgggtcgcgtgaggcggaaggccgaggacggccggcggcggcgcccgccccggcgatgcgggccccgcccgtcgcctcaggtgccatttggattgtactttagtggcacgatgtactctgagtggaggtcactgcatttggtgattcagaatgatcaaggccataccagtgtgctgcacagctatccagagagcgttggacgagaggtggcaaatgctgtagtccgtcctcttgggcaggtgttaggtaccccttcagtggctggtagtgagaatttgttaaaaactgacaaagaagtaaaatggaccatggaagtaatttgctatggactgacccttccattggatggagagactgtaaaatattgcgttgatgtatatacagactggattatggctttagtgttgccaaaagattctattccattgccagttattaaagagcctaatcaatatgttcaaactatactaaaacacctacagaatctttttgtaccaagacaggaacagggttccagtcagattcgactatgcttacaggtcctgagagccattcagaaactggcccgtgagtcatctctcatggcccgagaaacttgggaagtcttactgttgtttcttctgcagattaacgacatacttctggccccaccaactgttcaaggtggcattgctgagaatctagcagagaagttgattggtgttctctttgaggtgtggttactagcttgtactcggtgcttcccaacacctccttattggaaaacagccaaggagatggtggctaactggaggcatcacccagcagtggtggagcagtggagcaaggtcatttgtgcactcacttccagattgctacgctttacatatggtccttcatttcctgcatttaaagttcccgatgaagatgccagtctgatccctccagaaatggataatgagtgtgttgcacagacatggtttcgctttttacacatgttaagtaatcctgtggatttgagtaacccagctattataagctctactcccaaatttcaggaacagttcttgaatgtgagcggaatgccgcaagaattgaatcagtatccctgccttaaacatctgcctcaaatattttttcgtgccatgcgtggaatcagctgtctggtggatgcattcttaggtatttctagaccccgatcagacagtgctcccccaacacccgtgaatagattaagtatgcctcaaagtgctgctgtcagtaccacccccccacataaccggaggcaccgggctgttactgtgaataaggccaccatgaagacaagcacagttagtactgctcatgcctctaaagttcagcaccagacgtcctccacctctcctctgtcaagtccaaatcagactagttcagaaccccggccactgcctgcccctcggagaccaaaggttaacagcatcttgaatctctttggatcatggttatttgatgcagcatttgttcactgtaaacttcataatgggataaacagagacagcagcatgactgccattacaacacaagctagcatggagtttcgacggaaagggtcacaaatgtccacagacaccatggtttccaatcctatgtttgatgcaagtgaatttcctgataactatgaagcaggaagagctgaggcttgtgggacactgtgtaggattttttgtagcaagaagactggagaagagattctgccagcttatttatccagattttacatgcttttaattcaaggtttgcagataaatgattatgtgtgccatcctgtcttggccagcgttattctaaactctcctcctttgttctgctgtgacttgaaagggattgatgttgtggttccttactttatttcagctcttgaaaccattttgcctgacagagaactctcaaaattcaaaagctatgtaaatccaacagaattgcgaagatcctccattaatatcctgctttctttgttgcccctccctcatcattttggcacagtcaaatctgaggtggtcctggaaggaaagtttagtaacgatgacagctcttcttatgataaaccaataacttttctgtccctgaagttgagacttgtgaatatattaataggtgccttgcaaactgaaacggaccccaacaacacccaaatgatattaggggcaatgttaaatattgttcaagattcagcacttttggaagccattggttgccagatggagatgggtggtggagaaaataacctgaagagtcatagtcgcaccaatagtggtattagttcagcaagtggtggaagcacggagcccacgactcccgatagtgagagacctgctcaagctctcttaagagattatgctcttaatacagattcagctgctgggctcctgattcgcagcattcatctcgtcacccaaagactcaactcccagtggcgccaagacatgagcatatcactggcagctctagagctcctctctggccttgcaaaggtaaaagtgatggttgactcaggagaccggaagcgagccatcagttctgtgtgcacctacattgtttatcagtgtagtcggccagctcctttacactccagggatctgcactccatgatagtggcagcttttcagtgtctctgtgtctggctgacagagcaccctgatatgcttgatgaaaaggactgccttaaggaagtactggagattgtggaactgggtatctcaggaagtaagtccaagaacaatgagcaagaggtcaagtacaaaggagataaggagccaaaccctgcatctatgagggtaaaggatgctgctgaagccaccctaacatgcattatgcagttgctcggcgcatttccttcacctagtggtcctgcctctccttgtagtcttgtgaatgagaccactttgattaaatactccaggctgccaaccataaacaagcatagtttccggtactttgtcttggataacagtgtcatcctggcaatgctggaacaacctcttggaaatgagcagaatgattttttcccctctgtcactgtgctggtccggggaatgtctggaagacttgcttgggcacaacagctttgtcttttacccagaggagcaaaagcaaatcagaagctttttgtacctgaacctcgcccagttcctaaaaatgacgttggatttaaatattctgtgaaacatcggccatttcctgaagaggtggacaagattccttttgtgaaagcagatctcagcattccagatttgcatgaaatagtcactgaagaattagaagagagacacgaaaaattaaggagtggcatggcccagcagattgcttatgaaatacaccttgagcaacagagtgaggaggaattgcagaagagaagttttcctgacccagttacggattgcaagcccccgcctcctgcccaggaattccaaacagcccgcctttttctctcacactttggatttttgtccttagaagcactgaaggaacctgcaaatagtcgtctacctcctcaccttattgcacttgattccacgatacctggattttttgatgacattgggtatctggatctcttgccatgtcgtccttttgacacagtttttattttctatatgaagccaggtcagaaaacgaaccaagagattttaaagaatgtggagtcttccagaactgttcagccacatttcctagaatttttgctttcccttggctggtcagtagatgtgggcagacaccctggttggactgggcatgtttctaccagttggtctattaattgttgtgatgatggtgaaggatctcaacaagaagtgatttcctctgaagatattggagctagcattttcaatggacagaagaaggtgctgtattatgctgatgcccttacagaaattgcttttgtggttccttctcctgtggagtccttaactgattcattggaaagtaacatctcggaccaagatagtgattcaaatatggatcttatgccaggaattctgaaacagccatccctgacacttgagcttttccccaatcatacagacaatcttaattcctcacagaggctcagtcccagttccagaatgaggaagctgcctcagggtcgccctgttcctccccttggacctgagacaagagtttctgtagtctgggtggaacgctatgatgatatagaaaactttcccctctcagagctgatgacagagatcagtactggtgtggaaactactgcaaatagtagcacttcactgagatctacaactcttgaaaaagaagttcctgtcatcttcatccaccctttaaacactggattattccggataaaaattcaaggagccactggaaaatttaatatggtcatccctcttgtggatgggatgattgtcagcaggcgagctcttggctttctggtgaggcagactgtaattaacatttgtagaagaaagagactggaaagtgactcctacagtcccccccatgtccgccggaaacagaaaatcaccgacattgtcaacaagtaccggaacaagcagctggagccagagttttatacttcacttttccaggaggttggactcaagaactgcagttcttagaccactgaatttctaagactgttgaactccagtttgggaactataacacagcagaacagtttgataggtgatcactgtaaaaataaaaacaaatcactcccaagagcttactgtttaatcaccagaatagaagaaacacattataacccatttgatagaagactttgggctatctagtgaaatgggctcccagacacaatcacactcctgctgataatgatgatatacattttagccataaactttcttttaaaagtgacaattttagttaaacataagccttttgaggagaaaggcttttatgcatctcagttaaacacgtgcattggtagtatcaacaaatttgcaatatagaagttgaagatagttttttacctcactttttaggaggttgtattcaaaattaaaatctcagaatcttacaggacatttaaagactcatgttgatagcatggaggagaaggaaagaagtcacagccttctactcagttgtaggtcttcttgtcatccagctgtcacactgacaaaaagaaaagatgatacatgttttttgctcagataagaagcctgacattaaaagatgtcatatttttttctccacatttcaaaaagttgtccttctcatcactgcacagatctgtctgaaagcctcagtttctgagtgacccaggaacagatcagaaatggagcatggccttgtcctttaatggggatgcaaataaagtttgtggggttaaaagttataagacagcagtgataccccactctctccattattgtccagcggggtgacataatgacaggttaaatatttgtgattcattgattaaatattatttaaagaaatgtaaattcacaataagggttgaaaattatttggtttcatccattgtctcttatttcaggaccaagcagcaaactgcagtagtttgtgaaggattctaatatggggttcaggaatagcctctcaacgctactaattcagatctctcccagagaactactggatttcctcataattgacaaacatgagtgaccacctctttgggtggctactgttagaaatggctgttgtcatgttttctggactttgccagccaacagatccctgccaggttttggaaatacttctattacctcgctgctacttttctgcagggataaaacttttgaggtggccagacccagaacatccaaggattcctgttacagtgctacagtatacactgctcatttatcctattctcatgtgctttcttctttagtaagattattttaagaaaataagtgatatttaaagtccaaagaggaatgatcacagttgtataaggggtgttttcccacttgaactctgatgtcagtcgactgtgggtcagagctacaaccatctgtttggtttgatgttttggtggtttacttacggagtggggatagtgtgagacctaattccctgtgcaaatgtctcttattccagaaatgtgcattttgtcatctataagcaagaaatatgggcatagcagctcttggtttaaagtttgccataacctgttcatgtttgttttaagctcaggtaaagataacctcctctttctatgactccagtttccattcaggttatagtattattcaatagttgattttctttttaagctgggcaataaattgatgtttccagatggtaacatgggagagggcatataggataaagatgagcaaattctaccctaaaaatgttctagtagttcacaggaagaagatgaggtttaataactttcaaggtaattctagattgacattttgaggggaaaatgggctcttgttctagttgaagtgagcagagaaggctataaattaatatgtaacttacagcattccagaggttaaaaataactgatgcagatgtacttcttcagtgtgattcttcagatcaaacttttacttttggcatagttaatttcagaaaaatgtgctgtatgtgtgtgtgtatgagggttggtcttgctgatccttcagttagctctaaattctggcaactccttgtaattccaatgtatttgatacatgaacaatcatgttgaatgcatttgtgatctgggagacttcctcgtcttccagggaaggaaggatgtgcagcccctgaaggcatgaaactcccagtgtgtacggagccagtggaatatgggatacccataccttaccaggcgctggttccttctgctcacaataacatctgcccaaagagggagtgggaagaacgcttagctctttcactagtatggatttgagttcatggtcactatttttacccacctgcctttgttaaaaatcactttgagtagaatagcactggaggaacatatttagcacctaatattaatatttagtagtccattgataaatttgccagcatatgttctagcctctggggggaaaccaggaccacttttgtctgtggcttaaacagttcagttgctatatctgttgggtatgccgggggtggatgagtgtggcattccgtgaagaggaaggtggtaagtaaggtttcccttctactgccttcttaagttgcaggagggagcttttctcctcccctctggttgggagcactgaggacagtgaggagggcttttaccttgttaatcctttccttatttagctagctttcctttttgtctagggcttcctcttgagaccctcttccatccattgggcctttgaaaggactaatcagacacacacacacacacacacacacacacacacactcgcatactcatgcacattttccttcatttccagatcctttatttcagagcagcccattttcctctggattcattgatgaatacaagtacccacacctttggccagtaatgtcagttacctgctgcaggttctgtgtatgaggccttcatgaacggttaccttctccatacactagggaagcatttgtcagactctgcagactgggttctagagaggcagagtctttaagagtattcatttcttctggaaggtggagctttacccaaagtggaagttagccttgctcaaagatgtgttttgtggtaggtggtaaaaataaataaataaataaataataaaaaaagaaacatgtattggaggtaatttgacactgctgctggcagtagttctctattcaccattttaaagcccattcaggttctctcttcctgaaaagaactgattgctgtgtttacatgaaatgacattggagtcagatggtctgttttaaagatttccatgacagcctcttttcctgagttggagagattggaggtggtctatccgtacgatgtggaatcaaacggtgggtttcttagtagctaaagaagccatgtacttctagtgtgtttctcagaatatcaactcatgttcttcagatgcttttctttttttaatggtgagggaaaaggtataatttgggattccacagtgccttgcatatagtaggcgcccagtaaatacttgttgaagcaaaccaagtttcccaagtcctcatctcttatagtgaccaagacatctttctcctctgaagggcttggcagttgtggctaaaaaataagcagtatcattatttgcttgaaatcatatatacagtttgtatgaatttcagtatgttgccaagacatgattttttcttattgtattttctgtaaatatttctggcactgaactgtaaagtaaaggcaaagtgtaaatatgaaggcgtgcccgtgccccttgcctcctgtgtttcatcttcgtcggttagggaagaaggtccagaggtttgtttgtatttatgccgatcctttgtccagaagaagcccatggaatattgaatgtaatacatttagtcaattaaattttaaggagattcttatctaataa

SEQ ID NO: 205 - DNA, 3002 bp, Homo sapiens
gccagtcaccttcagtttctggagctggccgtcaacatgtcctttcctaaggcgcccttgaaacgattcaatgacccttctggttgtgcaccatctccaggtgcttatgatgttaaaactttagaagtattgaaaggaccagtatcctttcagaaatcacaaagatttaaacaacaaaaagaatctaaacaaaatcttaatgttgacaaagatactaccttgcctgcttcagctagaaaagttaagtcttcggaatcaaaggaatctcaaaagaatgataaagatttgaagatattagagaaagagattcgtgttcttctacaggaacgtggtgcccaggacagccggatccaggatctggaaactgagttggaaaagatggaagcaaggctaaatgctgcactaagggaaaaaacatctctctctgcaaataatgctacactggaaaaacaacttattgaattgaccaggactaatgaactactaaaatctaagttttctgaaaatggtaaccagaagaatttgagaattctaagcttggagttgatgaaacttagaaacaaaagagaaacaaagatgaggggtatgatggctaagcaagaaggcatggagatgaagctgcaggtcacccaaaggagtctcgaagagtctcaagggaaaatagcccaactggagggaaaacttgtttcaatagagaaagaaaagattgatgaaaaatctgaaacagaaaaactcttggaatacatcgaagaaattagttgtgcttcagatcaagtggaaaaatacaagctagatattgcccagttagaagaaaatttgaaagagaagaatgatgaaattttaagccttaagcagtctcttgaggagaatattgttatattatctaaacaagtagaagatctaaatgtgaaatgtcagctgcttgaaaaagaaaaagaagaccatgtcaacaggaatagagaacacaacgaaaatctaaatgcagagatgcaaaacttaaaacagaagtttattcttgaacaacaggaacgtgaaaagcttcaacaaaaagaattacaaattgattcacttctgcaacaagagaaagaattatcttcgagtcttcatcagaagctctgttcttttcaagaggaaatggttaaagagaagaatctgtttgaggaagaattaaagcaaacactggatgagcttgataaattacagcaaaaggaggaacaagctgaaaggctggtcaagcaattggaagaggaagcaaaatctagagctgaagaattaaaactcctagaagaaaagctgaaagggaaggaggctgaactggagaaaagtagtgctgctcatacccaggccaccctgcttttgcaggaaaagtatgacagtatggtgcaaagccttgaagatgttactgctcaatttgaaagctataaagcgttaacagccagtgagatagaagatcttaagctggagaactcatcattacaggaaaaagcggccaaggctgggaaaaatgcagaggatgttcagcatcagattttggcaactgagagctcaaatcaagaatatgtaaggatgcttctagatctgcagaccaagtcagcactaaaggaaacagaaattaaagaaatcacagtttcttttcttcaaaaaataactgatttgcagaaccaactcaagcaacaggaggaagactttagaaaacagctggaagatgaagaaggaagaaaagctgaaaaagaaaatacaacagcagaattaactgaagaaattaacaagtggcgtctcctctatgaagaactatataataaaacaaaaccttttcagctacaactagatgcttttgaagtagaaaaacaggcattgttgaatgaacatggtgcagctcaggaacagctaaataaaataagagattcatatgctaaattattgggtcatcagaatttgaaacaaaaaatcaagcatgttgtgaagttgaaagatgaaaatagccaactcaaatcggaagtatcaaaactccgctgtcagcttgctaaaaaaaaacaaagtgagacaaaacttcaagaggaattgaataaagttctaggtatcaaacactttgatccttcaaaggcttttcatcatgaaagtaaagaaaattttgccctgaagaccccattaaaagaaggcaatacaaactgttaccgagctcctatggagtgtcaagaatcatggaagtaaacatctgagaaacctgttgaagattatttcattcgtcttgttgttattgatgttgctgttattatatttgacatgggtattttataatgttgtatttaattttaactgccaatccttaaatatgtgaaaggaacattttttaccaaagtgtcttttgacattttattttttcttgcaaatacctcctccctaatgctcacctttatcacctcattctgaaccctttcgctggctttccagcttagaatgcatctcatcaacttaaaagtcagtatcatattattatcctcctgttctgaaaccttagtttcaagagtctaaaccccagattcttcagcttgatcctggaggtcttttctagtctgagcttctttagctaggctaaaacaccttggcttgttattgcctctactttgattctgataatgctcacttggtcctacctattatccttctacttgtccagttcaaataagaaataaggacaagcctaacttcatagaaacctctctatttttaatcagttgtttaataatttacaggttcttaggctccatcctgtttgtatgaaattataatctgtggattggcctttaagcctgcattcttaacaaactcttcagttaattcttagatacactaaaaatctgagaaactctacatgtaactatttcttcagagtttgtcatatactgcttgtcatctgcatgtctactcagcatttgattaacatttgtgtaatatgaaataaaattacacagtaagtcatttaaccaaaaaaaaaaaaaaaa

SEQ ID NO: 206 - DNA, 1164 bp, Homo sapiens
ggattttttagcttgcaaaaaaaatgagcaccaaacctgatatgattcaaaagtgtttgtggcttgagatccttatgggtatattcattgctggcaccctatccctggactgtaacttactgaacgttcacctgagaagagtcacctggcaaaatctgagacatctgagtagtatgagcaattcatttcctgtagaatgtctacgagaaaacatagcttttgagttgccccaagagtttctgcaatacacccaacctatgaagagggacatcaagaaggccttctatgaaatgtccctacaggccttcaacatcttcagccaacacaccttcaaatattggaaagagagacacctcaaacaaatccaaataggacttgatcagcaagcagagtacctgaaccaatgcttggaggaagacgagaatgaaaatgaagacatgaaagaaatgaaagagaatgagatgaaaccctcagaagccagggtcccccagctgagcagcctggaactgaggagatatttccacaggatagacaatttcctgaaagaaaagaaatacagtgactgtgcctgggagattgtccgagtggaaatcagaagatgtttgtattacttttacaaatttacagctctattcaggaggaaataagaatcatctaccttcaagcaagaattaacagagattgtggctacgcaaatgcaccaaaaaagggtgaaatatatctgaaatgtacctggttctgcccttggaagccacttcctgctcatgccactaacagcatgctgccaaactgttcagattcaagattattccaagcgcagggcccaaatgttatagccaaagaaagtcttatgataaaagtgaggcaaatttcagccaagaagttagaagagatgtttaaaagaacaagaacaaattgtggatcatggtatatgcaggctatcagcagaaggatcagacaataaaatgagttagtgcaaaccatttagtaaaaataactatcagcagagttgttccagattaaaaatagtactacaagcttgtaaaggagttaggacatgcaagctactgagcataaaatatatacttgctatttttcatgactttctctaataaagtctttgactgttctctctaataaaaaaaaaaaaaaaaaaaaaaaaaa

SEQ ID NO: 207 - DNA, 4325 bp, Homo sapiens
gccctttctgtgcggcgcccgggcgcaacgcaaacatggcggcgggtggcacccgtcggtgaggcggtgccgggcgggggttgtcgggtgtcatgggcggtggcgacggcaccgcccccgcgtctccctgagcgggacggcagggggggcttctgcgctgagccgggcgatggacgacagcggcgagctgggtggtctggagaccatggagaccctcacggagctgggcgacgagctgaccctgggagacatcgacgagatgctgcaatttgtcagtaatcaagtgggagagttccctgacttgttttcagaacagctgtgtagctcctttcctggcagtggtggtagtggtagcagcagcggcagcagtggcagcagcagcagcagcagcaatggcaggggcagcagcagcggagctgtggacccttcagtgcaacggtcattcacccaggtcacattaccttccttctctccctcggcggcctccccacaggctccaactctgcaagtcaaggtttctcccacctcagttcccaccacacccagggcaactcctattcttcagccccgcccccagccccagcctcaacctcaaactcagctgcaacaacagacggtaatgatcacgccaacattcagcaccactccgcagacgaggatcatccagcagcctttgatataccagaatgcagctactagctttcaagtccttcagcctcaagtccaaagcctggtgacatcctcccaggtacagccggtcaccattcagcagcaggtgcagacagtacaggcccagcgggtgctgacacaaacggccaatggcacgctgcagacccttgccccggctacggtgcagacagttgctgcgccacaggtgcagcaggtcccggtcctggtccagcctcagatcatcaagacagattcccttgttttgaccacactgaagacagatggcagccctgttatggctgcggtccagaacccggccctcaccgccctcaccacccctatccagacggctgcccttcaagtaccaaccctggtgggcagcagtgggaccattctgaccacaatgcctgtaatgatggggcaagagaaagtgcccattaagcaggtacctgggggagtcaagcagcttgagccccccaaagaaggagaaaggcggacaacccataatatcattgagaaacgatatcgctcctccatcaatgacaaaatcatcgaattgaaagacctggtcatggggacagacgccaagatgcacaagtctggcgttctgaggaaggccattgattacatcaaatacttgcagcaggtcaatcataaactgcgccaggagaacatggtgctgaagctggcaaatcaaaagaacaagcttctaaagggcatcgacctaggcagtctggtggacaatgaggtggacctgaagatcgaggactttaatcagaatgtccttctgatgtcccccccagcctctgactcagggtcccaggctggcttctctccctactccattgactctgagccaggaagccctctattggatgatgcaaaggtcaaagatgagccagactctcctcctgtggcgctgggcatggtagaccgctcacggattcttctgtgtgtcctcaccttcctgtgcctctcctttaaccccctgacttccctgctgcagtggggaggggcccacgactctgaccagcacccacactcaggctctggccgcagtgtcctgtcattcgagtcaggttctgggggctggtttgactggatgatgcctactcttctcttatggctggtaaatggtgtgattgtcctgagcgtctttgtgaagctgctggttcatggggagccagtgatccggccacactcgcgctcctcggtcaccttctggaggcaccggaaacaggcagatctggatctcgccagaggagattttgcagctgctgccggcaacctacaaacctgcctggcagttttgggccgggcactgcccacctcccgcctggacctggcctgcagcctctcctggaacgtgatccgctacagcctgcagaagctacgcctggtgcgctggctgctcaagaaagtcttccagtgccggcgggccacgccagccactgaggcaggctttgaagacgaagctaagaccagcgcccgggatgcggctctggcctatcaccggctgcaccagctgcacatcacagggaagcttcctgcaggatccgcctgttccgatgtacacatggcgttgtgtgccgtgaacctggctgaatgtgcagaggagaagatcccaccgagcacactggttgagatccatctgactgctgccatggggctcaagacccggtgtggaggcaagctgggcttcctggccagctacttcctcagccgagcccagagcctgtgtggccccgagcacagtgctgttcctgactccctgcgctggctctgccaccccctgggccagaagtttttcatggagcggagctggtctgtgaagtcagctgccaaggagagtctatactgtgcccagaggaacccagctgaccccattgcgcaggtccaccaggccttctgcaagaacctgctggagcgagctatagagtccttggtgaaacctcaggccaagaagaaggctggagaccaggaagaagagagctgtgaattctccagtgctctggagtacttgaaattacttcattcttttgtggactctgtgggggttatgagccccccactctccaggagctccgtgctcaagtccgccctgggtccagacatcatctgtcggtggtggacgtctgcaatcactgtggccatcagctggctccagggagacgatgcagctgtgcgctctcattttaccaaagtggaacgcatccccaaggccctggaagtgacagagagccccctggtgaaggccatcttccatgcctgcagagccatgcatgcctcactccctgggaaagcagatgggcagcagagttccttctgccattgcgagagggccagtggccacctatggagcagcctcaacgtcagtggggccacctctgaccctgccctcaaccacgtggtccagctgctcacctgtgacctgctactgtcgctacggacagcgctctggcaaaaacaggccagtgccagccaggctgtgggggagacctaccacgcgtcaggcgctgaactggcgggcttccaacgggacctgggcagcctgcgcaggctggcacacagcttccgcccagcataccgcaaggtgttcctgcatgaagccaccgtgcgcctgatggcaggagccagccccacccgcacccaccagctgctggaacacagcctgcggcggcgcaccacgcagagcaccaagcacggagaggtggatgcctggcccggccagcgagagcgggccaccgccatcctgctggcctgccgccacctgcccctctccttcctctcctccccgggccagcgggcagtgctgctggccgaagctgcccgcaccctggagaaggtgggcgaccggcgctcctgcaacgactgccagcagatgattgttaagctgggtggtggcactgccattgccgcctcctgaccaccaggctcagcccacccctccacctctctctcgatttctctctctccccctcagcatcttcccgctgagagtggtggggaagagccttgtcttcttagctgtcacctgccgaggcttctgggccactcaggccagtgcacccctgggcagagccccttaaagctgctgtcactagatgcccatggtccagggcctggtgggcgtgagaggataggtggcagggcagaaactgggcagccctgacttgatagcagcagggggagctcccaagctgccaagcccctgcctccagccttcctgagtttctctctcctgaaccctactctctcctttttgcttcctcagtttttatcaggctttctctgggggacagcagtctctgagcaccagggagcagttgccctcaggcctgtgcccagcatgccctcccctttttatacgaatgttttctaccagtgtgcttgggtttgccatgatgcgaggctgagttgctgtagcgtcttgattctctccctgggtctgcgttccctcccctgggcctgactgagcctgctcattgtttttccctttattacacaggacagccaggggaggaggggggcccagccctgggaggctggtgggaggcagggggcaggcctgcggatgcatgaaataatgttggcattattttttaattttttaaaaaataaatggtatcttatttaaaaaaaaaaaaaaaaaaaaa

SEQ ID NO: 208 - DNA, 8439 bp, Homo sapiens
cgcactctccgtccccgcggctggcgcaggacctcactcgagcggagcgcccacggggagcgggtcgcggggcggcggcggcgaggaggaggcgagaaggagttggaggaggaggaggaggaggcgagggcgagctagcccagcggggtcccggccgccccgcgggccaaagtcgagccctcccgcccgtgggcgagcgcgccagccgccccttccagaacagccgccgccacaaagaagaacggggggtgccgaggtccccatgacctcctaaagtggtgcggtccctgctgagtgcgctgcccgggccgtgacccgcgcccctgtgcgtccccgcgcgcctccgagcgcccctgtgcgccccggcccgcgccccgccggcatggacgtccatacccgctggaaagcgcgcagcgcgctccgcccgggcgccccgctgctgcccccgctgctgctgctgctgctgtgggcgccgcctccgagccgcgcagctcagccagcagatctcctgaaggttctagattttcacaacttgcctgatggaataacaaagacaacaggcttttgcgccacgcggcgatcttccaaaggcccggatgtcgcttacagagtcaccaaagacgcgcagctcagcgcacccaccaagcagctgtaccctgcgtctgcatttcccgaggacttctccatcctaacaactgtgaaagccaagaaaggcagccaggccttcctggtctccatctacaacgagcagggtatccagcagattgggctggagctgggccgctctcccgtcttcctctacgaggaccacacggggaagcctggcccggaagactaccccctcttccggggcatcaacctgtcagatggcaagtggcacagaattgctctcagcgtccacaagaaaaatgtcaccttgatcctcgactgtaaaaagaagaccaccaaattcctcgaccgcagcgaccaccccatgatcgacatcaatggcatcatcgtgtttggcacccggatcctggatgaggaggtgtttgagggtgacatccagcagctgctctttgtctcggaccaccgggcagcttatgattactgtgagcactacagccctgactgtgacaccgcagtacctgacaccccacagtcgcaggaccccaatccagatgaatattacacggaaggagacggcgagggtgagacctattactacgaatacccctactacgaagaccccgaagacctagggaaggagcccacccccagcaagaagcccgtggaagctgccaaagaaaccacagaggtccccgaggagctgaccccgacccccacggaagctgctcccatgcctgaaaccagtgaaggggctgggaaggaagaggacgtcggcatcggggactatgactacgtgcccagtgaggactactacacgccctcaccgtatgatgacctcacctatggcgagggggaggagaaccccgaccagcccacagacccaggcgctggggccgaaattcccaccagcaccgccgacacctccaactcctccaatccagctccgcctccaggggaaggtgcggatgacttggagggggagttcactgaggaaacgatccggaaccttgacgagaactactacgacccctactacgaccccaccagctccccgtcggagatcgggccgggaatgccggcgaaccaggataccatctatgaagggattggaggacctcggggcgagaaaggccaaaagggagaaccagcgattatcgagccgggcatgctcatcgagggcccgcctggcccagaaggccccgcgggtcttcccggacctccaggaaccatgggtcccactggccaagtcggggaccctggagaaaggggcccccctggacgcccaggccttcctggggccgatggcctgcccggtcctccaggaaccatgctcatgctgcccttccggtttggaggtggcggcgatgcgggctccaaaggccccatggtctcagcccaggagtcccaggcgcaagccattctccagcaggccaggttggcactgaggggaccagctggcccgatgggtctcacagggagacctggccctgtgggtccccctgggagcggaggtttgaagggcgagccgggagacgtggggcctcagggtcctcgaggtgtgcaaggcccgcctggtccggccgggaagcccggaagacggggtcgggctgggagtgatggagccagaggaatgcctggacaaactggccccaagggtgaccggggtttcgacggcctggctgggttgccaggcgagaagggccacaggggtgaccctggtccttccggcccaccaggacctccgggagacgatggagaaaggggtgacgacggagaagttgggcccagggggctgcctggggagcccgggccacgtggtctgcttgggccgaaggggcccccaggtcctcccggacctcccggtgtcacgggtatggacggccagccggggccaaaaggaaatgtgggtccccagggagagcctggccccccaggacagcagggtaatccaggcgcccagggtcttccaggcccccagggtgcaattggtcctccaggagaaaagggtcccttggggaaaccaggccttccaggaatgcccggtgctgacggacccccgggacaccctggcaaagaaggccctccaggagagaaaggaggtcagggtccacctggcccccagggtccgattggctacccaggtcctcgaggagtcaagggggccgatggcatccgtggtctgaagggcacaaagggcgagaagggtgaagacggctttcctgggtttaaaggagacatgggcatcaagggtgatcggggggagatcggcccacccggtcccaggggagaagatggccctgaaggcccaaagggtcgcggaggtcccaatggtgaccccggtcctctgggaccccctggggagaagggaaaactcggagtcccagggttaccagggtatccaggaagacaaggaccaaagggctctattggattccctggatttcctggcgccaatggagagaagggcggcagggggacccctggaaagccaggaccgcgggggcagcgaggcccaacgggtccgaggggtgaaagaggcccccggggcatcactgggaagcctggccccaagggcaactccggaggtgacggcccagctggccctcctggtgaacggggacccaatggaccccaaggacccacaggatttcctggaccaaagggcccccctggccctccaggcaaggatggactcccaggacaccctggacagagaggcgagactggtttccaaggcaagaccggccctccaggcccccccggcgtggtcggccctcagggtcccacgggagaaacgggcccaatgggtgagcgtggccaccctgggccccctggaccccccggtgaacaggggcttccgggccttgctggaaaagaagggacgaagggtgacccaggccctgcaggcctccctgggaaagatggccctccaggattacgtggtttccctggggaccgagggcttcctggtccagtgggagctcttggactgaaaggcaatgaagggccccctggcccaccaggccctgcgggatctccaggggagagaggtccagctggagccgctgggcccatcggaattccagggagacctgggccccagggacccccagggccggcaggagagaaaggggctcctggcgagaaaggcccacaaggcccagctggccgagacggtctccaggggcctgtggggctcccgggtccagctggccctgtgggtccccctggagaagacggagataagggagagatcggggagccggggcagaaaggaagcaagggggacaaaggagaacagggtcctcctgggcctacaggtcctcaaggccccatcggacagccaggcccctctggagctgacggcgagccggggcctcggggccagcagggccttttcgggcagaaaggtgatgaaggtcccagaggctttcctggaccccctgggccagtggggctgcagggtttgccaggacctccaggcgagaagggtgagacaggagacgtgggccagatgggccccccgggtccccctggcccccgaggaccctccggagctccaggtgctgatggcccacaaggtcccccaggtggaataggaaaccctggtgcagtgggagagaagggcgagcctggcgaagcaggtgagcctggccttccgggagaaggcggccccccgggacccaaaggagaaaggggagagaagggcgagtcaggcccttcaggtgctgccggaccccctggacccaaaggccctcccggagatgatggtcccaaaggcagccctggcccagtgggttttcctggagatcctggcccccccggagagcctggccccgcgggtcaagatggtccccctggtgacaaaggagatgatggtgaacccgggcagacgggatcccccggccctactggtgaaccaggtccatcggggcctccaggaaaaaggggtcccccaggccccgcaggccccgaaggcagacagggagagaaaggggccaagggagaagccggcttggaaggccctcctgggaagactggccccatcggcccccagggggcccctgggaagcccggaccggatggccttcgagggatccctggccctgtgggagaacaaggtctcccaggatccccaggcccggacggtccccccggccccatgggtcccccaggacttcccggcctcaaaggagattctggtcccaaaggtgaaaagggtcatccaggcctgatcgggctcatcggtcctccgggtgaacagggtgagaagggcgaccgtggtctccctggcccccagggctcctccggtcctaagggagaacagggtatcactggtccttctggcccgattgggcctcctgggccccctggcctgccgggtccgcctggtccaaaaggtgctaagggctcctcgggtccaactggcccgaagggtgaggcaggccacccaggacccccaggccccccgggccccccgggagaggtcatccagcccctgccaatccaggcatccaggacgcggcggaacatcgacgccagccagctgctggacgacgggaatggcgagaactacgtggactacgcggacggcatggaagagatcttcggctctctcaactctctgaagctggagattgagcagatgaaacggcccctgggcacgcagcagaaccccgcccgcacctgcaaggacctgcagctctgccaccccgacttcccagatggtgaatactgggtcgatcctaaccaaggatgctccagggattccttcaaggtttactgcaacttcacagccggggggtcgacatgcgtcttccctgacaagaagtccgaaggggccagaatcacttcttggcccaaagaaaacccgggctcctggttcagtgaattcaagcgtgggaaactgctctcctatgtggacgccgagggcaaccctgtgggtgtggtacagatgaccttcctgcggctgctgagcgcctctgcccaccagaacgtcacctaccactgctaccagtcagtggcctggcaggacgcagccacgggcagctacgacaaggccctccgcttcctgggctccaacgacgaggagatgtcctatgacaacaacccctacatccgcgccctggtggacggctgtgctaccaagaaaggctaccagaagacggttctggagatcgacacccccaaagtggagcaggtgcccatcgtggacatcatgttcaatgacttcggtgaagcgtcacagaaatttggatttgaagtggggccggcttgcttcatgggctaggagccgccgagcccgggctcccgagagcaacctcgtgacctcagcatgccattcgttcgtgagtgtcccgtgcacgtcctgaccctggacagtgaaggcttctccctcccctcccacctgacttcatctacgcctcggcaccacggggtgtgggaccccagcccggagagaacagagggaaggagccgcgcccccacctggagctgaatcacatgacctagctgcaccccagcgcctgggcccgccccacgctctgtccacacccacgcgccccgggagcggggccatgcctccagccccccagctcgcccgacccatcctgttcgtgaataggtctcaggggttgggggagggactgccagatttggacactatatttttttctaaattcaacttgaagatgtgtatttcccctgaccttcaaaaaatgttccaaggtaagcctcgtaaaggtcatcccaccatcaccaaagcctccgtttttaacaacctccaacacgatccatttagaggccaaatgtcattctgcaggtgccttcccgatggattaaaggtgcttatgtttttgtgagttttaagtaaatatttgtattgtattgttataaatgttaagtgtgcctggctttcaatcatgcacggaaacccagtctcagtcccacggacagaatgggcgaggcatggattctgggttgcagtaccgttctgattagaaataggaagtctccccacccccgccctggccaagaacgtgcaataaattggaagtttgccccggggcagcaagaatttatgctgccattgaaaagcaggtaccagtgccccttttcagacagtttttgattcgctctagactttttttttttttaatagggaaaaaatttgataattttcttttttctacatgcacttaagactaaaacacaggtttggattaattttatttgcttcctttttccgcttttcttcccgcagagcctgatgggagaatgtccagggcagggaaaccacattttttgtaggtgataactcaatgaaaattggtgcttattttttacacttctctcttgtggctctcttgtggtgctatctatctgttttaaggtctccttgaaggcgcactggggaccctggccatgcctcgttctccctgctttctttatcctgttattgcctccacagtctgttgccaaggactctaagatcaatgcacgtcactttcctttccactgggcaggatagccaagcacactccctcctgcgctctcccgccccggtgcgtccactcccgagggctgttatgaggactgggttgtgcctacttgatttgaaaacacacacaagcaataaaaagcctcttcctgcattgtctgtggtgtgaccatagcagattatatttggttcctgaatgtttgtggtgctaatttctgtgtttgttccaagccgttcagtcatgccatgcgctgcctcggtagatggagtaatgtacaatgaactccatgagtctctccagggctgcctgcagcacgtcttttccaagtagcctatttggattcccatctcaaatgtcctggatgcgagcgtcagcggctccagagctcggggcgggtgaggtcccctttggggaaccctttcctggccatcgaggtcggggggctgccgtctgtgggcaggaggacccgaggggcagccaggaaaggcgatctcttcactgtgaaaagttgcccgggtgcagcgccttttccttctaccatgggaaatgcaggctgggcccttggggtgagcctgcggggctctggtgctgtccccgacccccaccaccaccagaatgcagttccagcttaggaagccacaaacaagccacccaggaggaacaaaacaccgccagcgtggattttccaaatttccctggaaagtaagtctcgctcttgccaaagaaaagtctggcttggagagtctctggagcccaggatgccagcatgtgccaatgactgtcaccttcatctcttcaaaagaaaagccatagccgaggactgtcccgcgacccccgtggactgcgtctaggtcatgtgattctgttttcatttctcatcccatccaatttgtccttttctcctgtcattttcttcctctgtggtcccttcaaagttgttataatttgtactgaacttcaaaatgtgtcccgttctccccagaccactctagccacagtatattgcaataaaattacttcttatatttgcagaaattcttttggtgtaattttattttttcctctcaatatatataattggacaaacgctggcaaaaagaaaaaaatggtaagcaaaaaacccaagataaagtttcgaggacatcaggccttttgaaatacaatgtcaaatgacacattgtacggtttcaaaaaatccgctagacatgtcataagttttaactgtaatgcccaggaaaggatatcttaaaatattctaaacttgtgtaacaaaggaataattaactgtaatagtttttcaataaatcgagttgggtgtttccaccgtaaa

SEQ ID NO: 209 - DNA, 2500 bp, Homo sapiens; identical to SEQ ID NO: 61

SEQ ID NO: 210 - DNA, 3507 bp, Homo sapiens
ccacgcgtccgagcggggcgcctgggtggatgggcgcttgggcgcctgggctgccggacggtgggaacggaagtcgctgtgggacgctgaggaagccaggatggcgactccgagcaagaagacgtcaactccaagcccccagccttccaagagagctctcccgagagacccttcgtcggaggtcccgagcaagaggaagaattcggccccgcagctgccgctgttgcagtcgtccgggcctttcgtggaaggctctatcgtccgcatctcgatggagaacttcctaacatatgatatttgtgaagtatctcctggaccccacttgaatatgatcgttggagccaatggaacagggaagtcgagcattgtgtgtgccatttgccttggtttagctggaaaacctgctttcatgggacgagcagataaggttgggttttttgtgaagagaggatgttctagaggcatggttgaaattgaattgttcagggcttctggaaatcttgtaatcacccgtgagattgatgtggcaaaaaatcagtccttttggttcatcaacaaaaaatctacaacccagaaaatagtggaagagaaagttgcagccttaaatattcaagtggggaatctttgccagtttctccctcaggacaaagttggagaatttgctaaactcagcaaaattgaactcctcgaagccactgaaaagtcaattggtcccccagaaatgcacaaatatcactgtgaactcaaaaacttaagggagaaagaaaaacagctcgagacctcatgcaaagagaaaactgagtatctacagaaaatggttcagaggaatgaaagatataaacaagatgtggagaggttctatgaacggaagcgacatttagatttaattgagatgcttgaagcaaaaaggccatgggtggaatatgaaaatgttcgtcaggaatatgaagaagtaaaactagttcgtgaccgagtgaaggaagaggtcagaaaacttaaagaagggcagattcctataacatgtcgaattgaagaaatggaaaacgagcgtcacaatttggaggctcgaatcaaagaaaaggcaacagatattaaggaggcatctcaaaaatgcaaacagaagcaagatgttatagaaaggaaagataaacatattgaggaacttcagcaggctttaatagtaaagcaaaatgaagagcttgaccgacagaggagaataggtaatacccgcaaaatgatagaggatttgcaaaatgaactaaagaccacggaaaactgcgagaatcttcagccccagattgatgccattacaaatgatctgagacggattcaggatgaaaaggcattatgtgaaggcgaaataattgataagcgaagagagagggaaactctagagaaggagaaaaagagtgtggacgatcatattgtacgttttgacaatcttatgaatcagaaggaagataagctaagacagagattccgtgacacgtatgatgctgttttatggctaagaaataacagagacaaatttaaacaaagagtctgtgagcccataatgctcacgatcaatatgaaagataataaaaatgccaaatatattgaaaatcatattccatcaaatgacttaagagcctttgtatttgaaagtcaagaagatatggaggttttcctcaaagaggttcgtgacaataaaaaattaagagtaaatgctgttattgctcccaagagttcatatgcagacaaagcaccttcaagatctttgaatgaacttaaacaatacggatttttctcttatttgagagaattatttgatgcacctgatcctgtaatgagttacctttgctgtcagtatcatattcatgaagttcctgtaggaactgaaaagaccagagaaagaattgaacgggtaatacaagaaacccgattaaaacagatttatacagcagaagaaaagtatgtggtgaaaacttctttttattcaaacaaagttatttctagtaacacatctctaaaagtagcgcagtttctcactgtcactgtggacctagagcagagaagacacttagaagaacagctaaaggaaattcatagaaaattgcaagcagtggattcagggttgattgccttacgtgaaacaagcaaacatctggagcacaaagacaatgaacttagacaaaagaagaaggagcttcttgagagaaaaaccaagaaaagacaactggaacaaaaaatcagttccaaactaggaagtttaaagctgatggaacaggatacttgcaatcttgaagaggaagagcgaaaagcaagtaccaaaatcaaagaaataaatgttcaaaaagcgaaacttgttaccgaattaacaaacctaataaagatttgtacttctttgcatatacaaaaagtagatttaattctccaaaatactacagtgatctctgagaagaacaaattagaatcagattatatggccgcatcttcacaactccgtcttacagagcaacatttcattgaattggatgaaaatagacagagattattgcagaaatgcaaggaacttatgaaaagagctaggcaagtatgtaacctgggtgcagagcagactcttcctcaagaataccagacacaagtacccaccattccaaatggacacaactcctcactccccatggttttccaagaccttccaaacacattggatgaaattgatgctttattaactgaagaaagatcaagagcttcctgcttcacgggactgaatcctacaattgttcaggaatatacaaaaagagaagaagaaatagaacagttaactgaggaactaaagggaaagaaagttgaactagatcaatacagggaaaacatttcacaggtaaaagaaaggtggcttaatcctttaaaagagctggtagaaaaaattaatgaaaaattcagcaatttttttagttccatgcagtgtgctggtgaagttgatctccatacagaaaatgaggaagattatgataaatatggaattcgaattagagtcaaatttcgaagtagtactcaactgcatgaattaactcctcatcatcaaagtggaggtgaaagaagtgtttctaccatgttatacttgatggcacttcaggagctaaatagatgtccattcagagtagttgatgaaatcaatcagggaatggacccaatcaatgaacggagagtgtttgaaatggttgtaaatactgcctgtaaagaaaatacatctcaatactttttcataacaccaaagctcctgcaaaatcttccttattctgaaaagatgacagttttgtttgtctacaatggccctcatatgctggaaccaaacacatggaatttaaaggctttccaaaggcggcggcgccgtattacattcactcaaccttcttaataaaagtaaagagagggaacttgggaattttttttgttaaattctgtttataagtatggctcaactgaataaaaggagattcactaaaaaaaaaaaaaaaa

SEQ ID NO: 211 - DNA, 4348 bp, Homo sapiens
gggaggcccagggagaacggggaagggacatttagtttgagacggtgctgagataggatcatgaaggaagaggtgaagggaattcctgtaagagtggcgctgcgttgtcgccctctggtccccaaagagattagcgagggctgccagatgtgcctttccttcgtgcccggagagcctcaggtggtggttggtacagataaatccttcacctacgattttgtatttgatccctctactgaacaggaagaagtcttcaatacagcagtagcgccactcataaaaggtgtatttaaaggatataatgcaacggtcctggcctatgggcagactggctctggaaaaacctattcaatgggaggtgcatatactgcagagcaagagaatgaaccaacagttggggttattcctagggtaatacaactgctcttcaaagaaattgataaaaagagtgactttgaatttactctgaaagtgtcttacttagagatttacaatgaagaaattttggatcttctatgtccatctcgtgagaaagctcaaataaatatacgagaggatcctaaggaaggcataaagattgtgggactcactgagaagactgttttggttgccttggatactgtttcctgtttggaacagggcaacaactctaggactgtggcctccacggctatgaactcccagtcgtcccgatctcatgccatctttacaatctccttagagcaaggaaagaaaagtgacaagaatagcagctttcgctccaagctgcatcttgtagacctcgctggatcagaaagacagaagaaaaccaaggctgaaggggatcgtctaaaagagggtattaatattaaccgaggcctcctatgcttgggaaatgtaatcagtgctcttggagatgacaaaaagggtggctttgcgccctacagagattccaagttgactcgactgcttcaagattctctaggaggtaatagccatactcttatgatagcctgtgtgagtcctgctgactccaatctagaggaaacattaaatacccttcgctatgctgacagagcaagaaaaatcaagaacaaacctattgttaatattgatccccagacagctgaacttaatcatctaaagcaacaggtacaacagctacaagtcttgttgctacaggcccatggaggtaccctgcctggatctataactgtggaaccatcagagaatctacaatccctgatggagaagaatcagtccctggtagaggagaatgaaaaattaagtcgtggtctgagcgaggcagctggtcagacagcccagatgttggagaggatcatttggacagagcaagcgaatgaaaaaatgaacgccaagctagaagagctcaggcagcatgcggcctgcaaactggatcttcaaaagctagtggagactttggaagaccaggaattgaaagaaaatgtagagataatttgtaacctgcagcaattgattacccagttatcggatgaaactgttgcttgcatggctgcagccattgatactgcggtggagcaagaagcccaagtagaaaccagtccagagacgagcaggtcttctgacgcttttaccactcagcatgctctccgtcaagcgcagatgtctaaggagctggttgagttgaataaagcgcttgcactgaaagaggccctggctaggaagatgactcagaatgacagccaactgcagcctattcagtaccaataccaggataacataaaagagccagaattagaagtcatcaatctgcaaaaggaaaaggaagaattggttcttgaacttcagacagcaaagaaggatgccaaccaagccaagttgagtgagcgccgccgcaaacgtctccaggagctggagggtcaaattgctgatctgaagaagaaactgaatgagcagtccaaacttctgaaactaaaggaatccacagagcgtactgtctccaaactgaaccaggagatacggatgatgaaaaaccagcgggtacagttaatgcgtcaaatgaaagaagatgctgagaagtttagacagtggaagcagaaaagagacaaagaagtaatacagttaaaagaacgagaccgtaagaggcaatatgagctgctgaaacttgaaagaaacttccagaaacaatccaatgtgctcagacgtaaaacggaggaggcagcagctgccaacaagcgtctcaaggatgctctccagaaacaacgggaggttgcagataagcggaaagagactcagagccgtggaatggaaggcactgcagctcgagtgaagaattggcttggaaacgaaattgaggttatggtcagtactgaggaagccaaacgccatctgaatgacctccttgaagatagaaagatcctggctcaagatgtggctcaactcaaagaaaaaaaggaatctggggagaatccacctcctaaactccggaggcgtacattctcccttactgaagtgcgtggtcaagtttcggagtcagaagattctattacaaagcagattgaaagcctagagactgaaatggaattcaggagtgctcagattgctgacctacagcagaagctgctggatgcagaaagtgaagacagaccaaaacaacgctgggagaatattgccaccattctggaagccaagtgtgccctgaaatatttgattggagagctggtctcctccaaaatacaggtcagcaaacttgaaagcagcctgaaacagagcaagaccagctgtgctgacatgcagaagatgctgtttgaggaacgaaatcattttgccgagatagagacagagttacaagctgagctggtcagaatggagcaacagcaccaagagaaggtgctgtaccttctcagccagctgcagcaaagccaaatggcagagaagcagttagaggaatcagtcagtgaaaaggaacagcagctgctgagcacactgaagtgtcaggatgaagaacttgagaaaatgcgagaagtgtgtgagcaaaatcagcagcttctccgagagaatgaaatcatcaagcagaaactgaccctcctccaggtagccagcagacagaaacatcttcctaaggatacccttctatctccagactcttcttttgaatatgtccagcctaagccaaaaccttctcgtgttaaagaaaagttcctggagcaaagcatggacatcgaggatctaaaatattgttcagagcattctgtgaatgagcatgaggatggtgatggtgatgatgatgagggggatgacgaggaatggaagccaacaaaattagttaatgtgtccaggaagaacatccaagggtgttcctgcaagggctggtgtggaaacaagcaatgtgggtgcaggaagcaaaagtcagactgtggtgtggactgttgctgtgaccccacaaagtgtcggaaccgccagcaaggcaaggatagcttgggcactgttgaacggacccaggattcagaaagctccttcaaactggaggatcctaccgaggtgaccccaggattgagcttctttaatcccgtctgtgccacccccaatagcaagatcctgaaagagatgtgcgatgtggagcaggtgctgtcaaagaagactcccccagctccctccccttttgacctcccagagttgaaacatgtagcaacagaataccaagaaaacaaggctccagggaagaaaaagaaacgggctctggccagcaacaccagcttcttctctggctgctcccctatcgaagaagaggcccactgaagttggagtcatcatctctacccccagtctggcttgggagatgctttcaggttgcagccagaaggggttttttaaatgacttctctggatttcaggtttcttgctgttgaaaaaaggaacaaagcgttactgaaaagaaggtaacctttgttggatgtgggccttagcctccaggtccagactactactctatgttctccagaagggtgctaagtcacctactgaagagagaaccaactgactttcctattgactcatcaggaaccagtcctcagtctggtcaagttgtttcttatttgtgagcagttcaggctatctcctgatggggatgaggccaaggctttcttatcttttggttgtctctgcttaatggaggagcctggcctaggatggaggcctggcttagatctttcattccacctcaggaatgaggttgtgatctttcctgtcctgaccctctctgaattatgtttcaatagtactcttgattgtctgccatgttgttgaagcaaatgaattatttttaaatgttaagtaagtaaataaaccttagcccgtctttttttttttttttttttttttttttttt

SEQ ID NO: 212 - DNA, 12877 bp, Homo sapiens; identical to SEQ ID NO: 10

SEQ ID NO: 213 - DNA, 3511 bp, Homo sapiens
cggggcggcggcgggggccgggggggcccgggcgcgcgggagcgggagcggccgggggagccggagcgcaccatggaggcggcggcaggcggccgcggctgtttccagccgcacccggggctgcagaagacgctggagcagttccacctgagctccatgagctcgctgggcggcccggccgctttctcggcgcgctgggcgcaggaggcctacaagaaggagagcgccaaggaggcgggcgcggccgcggtgccggcgccggtgcccgcagccaccgagccgccgcccgtgctgcacctgcccgccatccagccgccgccgcccgtgctgcccgggcccttcttcatgccgtccgaccgctccaccgagcgctgcgagaccgtactggaaggcgagaccatctcgtgcttcgtggtgggaggcgagaagcgcctgtgtctgccgcagattctcaactcggtgctgcgcgacttctcgctgcagcagatcaacgcggtgtgcgacgagctccacatctactgctcgcgctgcacggccgaccagctggagatcctcaaagtcatgggcatcctgcccttctcggcgccctcgtgcgggctcatcaccaagacggacgccgagcgcctgtgcaacgcgctgctctacggcggcgcctacccgccgccctgcaagaaggagctggccgccagcctggcgctgggcctggagctcagcgagcgcagcgtccgcgtgtaccacgagtgcttcggcaagtgtaaggggctgctggtgcccgagctctacagcagcccgagcgccgcctgcatccagtgcctggactgccgcctcatgtacccgccgcacaagttcgtggtgcactcgcacaaggccctggagaaccggacctgccactggggcttcgactcggccaactggcgggcctacatcctgctgagccaggattacacgggcaaggaggagcaggcgcgcctcggccgctgcctggacgacgtgaaggagaaattcgactatggcaacaagtacaagcggcgggtgccccgggtctcctctgagcctccggcctccataagacccaaaacagatgacacctcttcccagtcccccgcgccttccgaaaaggacaagccgtccagctggctgcggaccttggccggctcttccaataagagcctgggctgtgttcaccctcgccagcgcctctctgctttccgaccctggtcccccgcagtgtcagcgagtgagaaagagctctccccacacctcccggccctcatccgagacagcttctactcctacaagagctttgagacagccgtggcgcccaacgtggccctcgcaccgccggcccagcagaaggttgtgagcagccctccgtgtgccgccgccgtctcccgggcccccgagcctctcgccacttgcacccagcctcggaagcggaagctgactgtggacaccccaggagccccagagacgctggcgcccgtggctgccccagaggaggacaaggactcggaggcggaggtggaagttgaaagcagggaggaattcacctcctccttgtcctcgctctcttccccgtcctttacctcatccagctccgccaaggacctgggctccccgggtgcgcgtgccctgccctcggccgtccctgatgctgcggcccctgccgacgcccccagtgggctggaggcggagctggagcacctgcggcaggcactggagggcggcctggacaccaaggaagccaaagagaagttcctgcatgaggtggtcaagatgcgcgtgaagcaggaggagaagctcagcgcagccctgcaggccaagcgcagcctccaccaggagctggagttcctacgcgtggccaagaaggagaagctgcgggaggccacggaggccaagcgtaacctgcggaaggagatcgagcgtctccgcgccgagaacgagaagaagatgaaagaggccaacgagtcacggctgcgcctgaagcgggagctggagcaggcgcggcaggcccgggtgtgcgacaagggctgcgaggcgggccgcctgcgcgccaagtactcggcccagatcgaagacctgcaggtgaagctgcagcacgcggaggcggaccgggagcagctgcgggccgacctgctgcgggagcgcgaggcccgggagcacctggagaaggtggtgaaggagctgcaggaacagctgtggccgcgggcccgccccgaggctgcgggcagcgagggcgctgcggagctggagccgtagattccgtgcctgccgccgcagcgccgccgacaacgcgggtgcaggggggcgcggctgggcggtgcagctccgcccggctccgcccctgcagcccacacagcacaacgtcttaccgtgcctattaccaagcgagtgtttgtaaccatgtagttttggaacccactgcaaaattttctactggccaagttcaagtgagtaagccgcgtcccccaactacagctggagacggggccagctcggcggcctgctggtcctctgcttgctggaacattctaacatttacacttttgttataagctatttaaaaccagtaaggagacttgaaattcagaaaatcaacacatttttaaatgactaacttctaaaagccccaacacatgacgccatctgaagacccgcaacggagtgggggtggcggccgccccaccctccccacccggggaagccatcacagctcatctgcccgcggctgcgtgaggacagcaggggtttttcttcagagtctattttttcagcgacaaggacccaggtcttcctgctgctgccagggagagcagggacagtgccgcgtgcgagatgagctcgaacactgcccgccttactgccgcctaccccgcccgccacgccgccgtcgatgccagcgctgtccccacgggtaccaggaagtgcagagccgcacaggagctgccccggagctgaggggacggtcttcggctcctctgcaccccgtgattctgcccacgctcctccaccacgaggcactgacctgcgtcgggtggtgaccgtggctggcggtcacgccctcagccctccgggcacacgtgccgcctgaccgggcgacccttttcagttcggcaaacgtcgctcccttcattttgggactgaggctgcagcattggaacaaaagagcattatttcaatttttctttctttttttttgttcgttcatttaaacgtatatttagaactgcactttgtccacaaccttcccttctctttctattccccagtgaactgaggtttttaccgactttatagagcagtcaaatccgaagtgctcgagtgcttagaaaccccctctggtgcttggttgaacaagggaatcacaaaaaaacgaaaatgcaaaaactgaacttcgggggtcgttctgtgccttccagcatcttgtacagcaaatcctgactcgtgtctttttacccccaagatatctgtcttcagtagcgactgaatctgccactctcagaataagttc

SEQ ID NO: 214 - DNA, 2834 bp, Homo sapiens; identical to SEQ ID NO: 126

SEQ ID NO: 215 - DNA, 885 bp, Homo sapiens
agcctacgcacgaaagtgactagggaggaaggatattataaagtgatgcaaacagaaattccaccagcctccatgtatcatcatgtgtcataactcagtcaagctcagtgagcattctcagcacattgcctcaacagcttcaaggtgagccagctcaagactttgctctccaccaggcagaagatgacagactgtgaatttggatatatttacaggctggctcaggactatctgcagtgcgtcctacagataccacaacctggatcaggtccaagcaaaacgtccagagtgctacaaaatgttgcgttctcagtccaaaaagaagtggaaaagaatctgaagtcatgcttggacaatgttaatgttgtgtccgtagacactgccagaacactattcaaccaagtgatggaaaaggagtttgaagacggcatcattaactggggaagaattgtaaccatatttgcatttgaaggtattctcatcaagaaacttctacgacagcaaattgccccggatgtggatacctataaggagatttcatattttgttgcggagttcataatgaataacacaggagaatggataaggcaaaacggaggctgggaaaatggctttgtaaagaagtttgaacctaaatctggctggatgacttttctagaagttacaggaaagatctgtgaaatgctatctctcctgaagcaatactgttgaccagaaaggacactccatattgtgaaaccggcctaatttttctgactgatatggaaacgattgccaacacatacttctacttttaaataaacaactttgatgatgtaacttgaccttccagagttatggaaattttgtccccatgtaatgaataaattgtatgtatttttctct

SEQ ID NO: 216 - DNA, 1904 bp, Homo sapiens
agctatttcaaggcgcgcgcctcgtggtggactcaccgctagcccgcagcgctcggcttcctggtaattcttcacctcttttctcagctccctgcagcatgggtgctgggccctccttgctgctcgccgccctcctgctgcttctctccggcgacggcgccgtgcgctgcgacacacctgccaactgcacctatcttgacctgctgggcacctgggtcttccaggtgggctccagcggttcccagcgcgatgtcaactgctcggttatgggaccacaagaaaaaaaagtagtggtgtaccttcagaagctggatacagcatatgatgaccttggcaattctggccatttcaccatcatttacaaccaaggctttgagattgtgttgaatgactacaagtggtttgccttttttaagtataaagaagagggcagcaaggtgaccacttactgcaacgagacaatgactgggtgggtgcatgatgtgttgggccggaactgggcttgtttcaccggaaagaaggtgggaactgcctctgagaatgtgtatgtcaacacagcacaccttaagaattctcaggaaaagtattctaataggctctacaagtatgatcacaactttgtgaaagctatcaatgccattcagaagtcttggactgcaactacatacatggaatatgagactcttaccctgggagatatgattaggagaagtggtggccacagtcgaaaaatcccaaggcccaaacctgcaccactgactgctgaaatacagcaaaagattttgcatttgccaacatcttgggactggagaaatgttcatggtatcaattttgtcagtcctgttcgaaaccaagcatcctgtggcagctgctactcatttgcttctatgggtatgctagaagcgagaatccgtatactaaccaacaattctcagaccccaatcctaagccctcaggaggttgtgtcttgtagccagtatgctcaaggctgtgaaggcggcttcccataccttattgcaggaaagtacgcccaagattttgggctggtggaagaagcttgcttcccctacacaggcactgattctccatgcaaaatgaaggaagactgctttcgttattactcctctgagtaccactatgtaggaggtttctatggaggctgcaatgaagccctgatgaagcttgagttggtccatcatgggcccatggcagttgcttttgaagtatatgatgacttcctccactacaaaaaggggatctaccaccacactggtctaagagaccctttcaacccctttgagctgactaatcatgctgttctgcttgtgggctatggcactgactcagcctctgggatggattactggattgttaaaaacagctggggcaccggctggggtgagaatggctacttccggatccgcagaggaactgatgagtgtgcaattgagagcatagcagtggcagccacaccaattcctaaattgtagggtatgccttccagtatttcataatgatctgcatcagttgtaaaggggaattggtatattcacagactgtagactttcagcagcaatctcagaagcttacaaatagatttccatgaagatatttgtcttcagaattaaaactgcccttaattttaatatacctttcaatcggccactggccatttttttctaagtattcaattaagtgggaattttctggaagatggtcagctatgaagtaatagagtttgcttaatcatttgtaattcaaacatgctatattttttaaaatcaatgtgaaaacatagacttatttttaaattgtaccaatcacaagaaaataatggcaataattatcaaaacttttaaaatagatgctcatatttttaaaataaagttttaaaaataactgca

SEQ ID NO: 217 - DNA, 2544 bp, Homo sapiens
atgagctacgcatgccatgaaaaaccagccagatggcaggataatgacatctcagtactgagtcaaagtaagcacactgggtcttcctgtgaactcagaagtaaaatcaatggaaagaccctcaggacactggttgataccaggacacattcaatactcccagctgcgtttgtgacaccagagtctcagaggagatccctcgcctcccacatggctttgggagaagatgctgtgattgttaatctggatgaaaaacgggaaaactgggctgattattttggactattccttccccttggaaaatctgctttcagacgttcacttccaaatgctagtaaagccttgtcagctgggatctcccttccctttttcaatggactagcacaggacctgcccacagaggccctaactcagtgctctctgaatgaatggatgaatgggtacaggtcagtgctcaaaattaacgggcaggatgtgtcgatgggagccaacaaaaatatcgatactccactatttacatgtcagggagttgaattattgtctactggactctcccagaccactctgggcactgtttttagtgaagcggacacttggggtcacacttttgatgacagcaataagagtgaacacttgacctctccaaagaggtgccacagatgtaatgctgcaggtcccaaaggtgctgcccttcatgtccaaatggcacagcactgccctaaagctggccccttagcagctgtgacagtcagggagcaacccccacatgtgcagcttagcaggatgccacccagaggtctgagacactgtcagggaagaagaaacaatggaggagaaaagaagagaagggtttttttttttttttttttttttttttttgctctcgcccgtgacattttctccaaatcggaagaaaatcaagtgtatgtcgagctttgccgcaggcagcccttggtctccgctttcagattcggggtccgggagcggagcgccctgcccgcggcggtgctaaactctggggccagggtgtggccctcagcgagcgccctgggactggccgccccgccgaaggatgccgaggatcgggcaaggccggcgtccggtctgcgcggggcgcgggtgctctccgaaggccgcgagccacgggcctcgctgcgggttcaagtgcgtccgggtttggacgtcgcggctccaggagtgtgctctctctcctgcccatcccctccccggagttcagcgcatccggggccccggggacccctcttcccggccctcctggccgcgctggcccgcccgcatggggccgaggttcctggccgacgcgcgagggcgcgggcgggtaccgggttcccgtttttcccaggccccgatccccgcccacgcacgaggcccccggcccacgcacgaggcgcccacgcccatcgtggaggctccgcctggaaaagaagtccgacttcctctccaagctgctccgaggggaatggggaatcggcaggaaatgacccgaactgccagcctgcgcctttgcagccggccctcgctttgctgaagacgagcagctcccaccaaagtcttgcctccccttaccccgaaagccccgctcagttcaatatttcaagtgaaaatctgcctgttcgaaaataaaatattcacaaatgagcagtgtattagaagacaactgaattgcttctaagaatgggtctcactctgccatcacccaggctggagtgtggtggcaccatcatggctcactgcagccttgaactcctgagctcaagtcatcctcccacctcagccttccgagtagctggaactgcaggtgtgagccaccatgcctggctgatttgtctttttaaattttttatagagaccgagtctcaactatattgtccaggctggaaaagaacttctttccctccaagtgataaccttttccagacaagtcagcttaaaaactgacccaaaggccctgaagtacacagttttcttggagaaagaaaaaaataagtgaaaaggacttgctgacttgctaattcattttggggcctgtgggtaacatcagaatggcaaagcacttggggcttttttctaatttgtatttttttaatcttctgagaaatgacttttatatgccaagattcattccatgattagtttttatgaccaagttatgaacgcttttgaatatggggacctagaatagaaatgctaacctacctgcaaggagagctctgtgattggcatccccatcatgctgtaactgacacaaaataaacttagggtaattgccgcatagtgtaactttaatgtgtgagcatactgtaacatctgacaagcttcttgatctagatcagcaatgtgtaacccattcattgttgtcactctcaacaaggccttatggtcaaacatcatcactctcactaaagagatagtttactgaaatatactgagattttgaaactggagtcaagaggtagcacactgttttatgttgatccatttaatggtccttgacagccaataaaaagacactggaagaatacg

SEQ ID NO: 218 - DNA, 2288 bp, Homo sapiens
aaagttaagagtggcgccagggatttgaaccgcgctgacgaagtttggtgatccatcttccgagtatcgccgggatttcgaatcgcgatgatcatcccctctctagaggagctggactccctcaagtacagtgacctgcagaacttagccaagagtctgggtctccgggccaacctgagggcaaccaagttgttaaaagccttgaaaggctacattaaacatgaggcaagaaaaggaaatgagaatcaggatgaaagtcaaacttctgcatcctcttgtgatgagactgagatacagatcagcaaccaggaagaagctgagagacagccacttggccatgtcaccaaaacaaggagaaggtgcaagactgtccgtgtggaccctgactcacagcagaatcattcagagataaaaataagtaatcccactgaattccagaatcatgaaaagcaggaaagccaggatctcagagctactgcaaaagttccttctccaccagacgagcaccaagaagctgagaatgctgtttcctcaggtaacagagattcaaaggtaccttcagaaggaaagaaatctctctacacagatgagtcatccaaacctggaaaaaataaaagaactgcaatcactactccaaactttaagaagcttcatgaagctcattttaaggaaatggagtccattgatcaatatattgagagaaaaaagaaacattttgaagaacacaattccatgaatgaactgaagcagcagcccatcaataagggaggggtcaggactccagtacctccaagaggaagactctctgtggcttctactcccatcagccaacgacgctcgcaaggccggtcttgtggccctgcaagtcagagtaccttgggtctgaaggggtcactcaagcgctctgctatctctgcagctaaaacgggtgtcaggttttcagctgctactaaagataatgagcataagcgttcactgaccaagactccagccagaaagtctgcacatgtgaccgtgtctgggggcaccccaaaaggcgaggctgtgcttgggacacacaaattaaagaccatcacggggaattctgctgctgttattaccccattcaagttgacaactgaggcaacgcagactccagtctccaataagaaaccagtgtttgatcttaaagcaagtttgtctcgtcccctcaactatgaaccacacaaaggaaagctaaaaccatgggggcaatctaaagaaaataattatctaaatcaacatgtcaacagaattaacttctacaagaaaacttacaaacaaccccatctccagacaaaggaagagcaacggaagaaacgcgagcaagaacgaaaggagaagaaagcaaaggttttgggaatgcgaaggggcctcattttggctgaagattaataattttttaacatcttgtaaatattcctgtattctcaacttttttccttttgtaaattttttttttttgctgtcatccccactttagtcacgagatctttttctgctaactgttcatagtctgtgtagtgtccatgggttcttcatgtgctatgatctctgaaaagacgttatcaccttaaagctcaaattctttgggatggtttttacttaagtccattaacaattcaggtttctaacgagacccatcctaaaattctgtttctagatttttaatgtcaagttcccaagttccccctgctggttctaatattaacagaactgcagtcttctgctagccaatagcatttacctgatggcagctagttatgcaagcttcaggagaatttgaacaataacaagaatagggtaagctgggatagaaaggccacctcttcactctctatagaatatagtaacctttatgaaacggggccatatagtttggttatgacatcaatattttacctaggtgaaattgtttaggcttatgtaccttcgttcaaatatcctcatgtaattgccatctgtcactcactatattcacaaaaataaaactctacaactcattctaacattgcttacttaaaagctacatagccctatcgaaatgcgaggattaatgctttaatgcttttagagacagggtctcactgtgttgcccaggctggtctcaaactccaccaaatgtacttcttattcattttatggaaaagactaggctttgcttagtatcatgtccatgtttccttcacctcagtggagcttctgagttttatactgctcaagatcgtcataaataaaattttttctcattgtcataaaaaaaaaaaaaa

SEQ ID NO: 219 - DNA, 6866 bp, Homo sapiens
gcagatgcgctggccccagcccggggctgccgctcgccttcccccggagtctcctggacccccggagtctcctggacccccggagcgggaggcagcggccgcgcggcgctggactggagcagaaccccaggactgcgcccccgggagcgggcgcccagagaagcctccccagctttctgaggatgatatctggctaaaaagcgagggagacaactatagtgccaccctcctggagcctgctgccagctctctttccccagatcacaaaaacatggaaattgaggtgtctgttgcagaatgtaaaagtgttcctggaatcacctctaccccacatcccatggaccatccctccgctttctattcacccccgcataatggcctccttactgatcaccacgaatccctggataatgatgttgccagagagatccgctatctagatgaggtgctagaggccaactgctgtgattctgctgtggatggaacgtacaatggaacatcctccccagagcctggtgcagtggttctggtgggcggcctaagcccccctgtccacgaggcgacccagccagaacccactgaaagaacagctagccggcaggcacctcctcacatcgagctcagtaatagcagccctgaccccatggcagaggcagaaagaacaaatggccattcccccagccagcctagagatgcgctgggggacagcctgcaggtgcctgtcagccccagctccacaaccagctcacggtgttcttcccgagatggagagttcactctcaccacactgaaaaaggaggccaagtttgagctgcgtgccttccatgaggacaagaagccctccaagctctttgaggatgacgagcatgagaaagaacaatactgcattagaaaagtgaggccttcagaggagatgctggagctggaaaaggagaggagagagctcatccgcagccaggccgtcaagaagaatcctggcattgcagcaaaatggtggaatcccccgcaggaaaaaaccatcgaggagcagctggacgaggaacatctggagtcgcacaaaaagtacaaggagcgcaaagagagaagggcacagcaggaacagttgctgctgcagaagcagttacagcagcagcagcagcagcccccatcgcagctctgcacagcccctgcctcttctcatgaacgcgcaagcatgattgacaaagcaaaggaggacattgtcacagagcagatagatttctctgctgctcgcaaacaatttcagctgatggagaattccaggcaagcggtggccaagggccagagtacacccaggctgttctccatcaagcctttctacaggcctctggggtcagtcaactcagacaagccactgactaatccgagaccaccttctgtcgggggacctccagaagacagtggtgcctcagccgccaagggacagaaatcccccggtgccctggagaccccatcggcagcaggaagccagggcaacacagcctctcaggggaaggaagggccctacagcgagccttctaaacgtgggcccttatctaaactgtgggctgaggatggagaatttacgagcgcccgggctgtcctcactgtggtcaaggatgatgaccatgggattttggatcagttctcaagatctgtcaatgtctccttgacccaagaggagcttgactctggtctggacgaattgtcggtgaggtctcaggataccacagtcctggagaccctatccaatgatttcagcatggacaacatcagtgacagcggggcatccaatgagacaaccaatgccctccaggaaaattcactggctgatttttctctgccccagacaccacaaactgacaacccctcagagggccgaggagaaggcgtctccaagtcatttagtgatcatggtttctattccccttcctccacgctgggggactctccgttggttgatgaccccttggagtatcaggctggcctcctggtgcagaatgccattcaacaagccatagccgagcaggtggataaagctgtgtccaaaaccagcagggatggagcagagcaacagggacctgaagcgactgtagaggaagctgaagctgcggctttcggctcagaaaagcctcagagcatgtttgagccacctcaggtgtcttctcctgttcaagagaaaagggatgtattaccaaagattctgcctgctgaagacagggcgctcagggaaagggggcccccccagccactgccagctgtgcagcccagtggcccgattaacatggaggagaccaggcccgaaggaagctatttcagcaagtactcggaggcagctgagctgagaagcacagcctccctcctggccactcaagaatctgacgtgatggttgggcctttcaagctgaggtccaggaaacagcggactttgtccatgattgaggaagagatccgagcagctcaggaaagggaagaggagctgaagaggcagagacaagtcttgcagagtacgcagagccccaggacaaagaatgccccatcactgccctccagaacatgctacaaaactgctccagggaaaatagagaaagtcaaacctcctccatcccccaccactgaaggccccagcttgcagcctgacttagcccctgaagaggctgccggaacccagcggcccaagaatctgatgcagaccctcatggaagactatgagacacacaaatctaaaaggcgcgagagaatggatgatagtagtgtcctcgaggccacacgggttaatcgaagaaagagcgcactggctttgcgctgggaagcagggatctatgccaaccaggaggaagaagacaacgaataaacttccttcaacccaggaagcgtctttggtgcttgggagaccaagaaaccaagaaattaacaactgaaagcattttaatggactatttattaaagtgcaaacaaactcagcaatccttatgtagaccagaagctgcaatatacaatgatgaaaatgaaacgaaaaggaagtccccccatcagactctggacacccaggaatcaaaagagaaaggacttttttggtgactcaatcccagtgtctggtttggggccaatctacaatggatccaaaaggacaaaacatgttacaagcaaatcaacatagttgctgcaggcggaactgagaccagcctctctgggcgatgaaggacaatggtggtagggccacttagagagcagtagggcccaggctggtgcagcctacatggcacaggatatttccctgcaccagtttcccacctgtcacttgcagcatcagagggtgttgcattaactccattttctccagcagccataaaatgaatggcgtttctctccatatttgcccagaagaggcagttatgattccacttctcctacatttaattatttttaattgagaacaactcatgatcacaattcataaaatccatattttaagacaatagttcttcatgtcacaaacacaatctattctacatgaggaggctgagaaaggggaagagaaaaacaaaccaaatggatgatgttagctttaggatcgtgtctgcttataatattcactgatctgcagtttatgagaacacattttcacagttatgtttcttcataggaaaactatatttagtgggcaacaactatttttatgatgggatgggggagtatatacacgtatagaatctgtacgcgttgaacaacttggttcaagatggtgggggcatttttagagcggcaataattgaaaaaaaaggcgaactctgccttggagaggtagatgataagaaataaaaaggtgtttataactattttgtattataaagtgggccttagagataggaagaagaatgatggattccttttggatcaatcagaaaggaaacacgaaagaaaagtcaggaaggtagagagagaaaaagggagggaaggagaaagaatgggaataaaataaggaggtaagagatactatttttgctgagcaaccagtgtgtttcaggatgatacaaagaaaaatatagaatagaaataagtgcaggcttggaatcagctacaaatcctaaagatggggtgtgtgtggatgtgtgtgtgtgtgtgtgtacaccattgtgtgtttgtaaaatgtgtatgttcatgagtaagggtgtgtgtgtgtgtgtattaaaattccagagtgaccgtggcacttgggtgtacaggtaattcctccagagctgtttgctggcttcaggagtggagtgagaatttcttttttatgaaaagggatataaaggcaccgagctgatgcagtatttgtaatattaagttgacctaacaaggtatttgcatgagtcacaattacaaagttttgagcggttttgtaatttgacatttaggagagtctcctatttattctcatactttacattcatgcttagtatactatagaggatgccagctttaatctttctgtcatttaaagcaatatgataagggtattcaataattgggtgccctaaatttctggatgagaaaattttcaattctggccatgagaaagaaaaaaaaataaacagccttctttttttttcctttgttttaaaactgtggttttttaaaaaagcaataattaactcagacctcactaaaaatcatttttgtttttatattgttatgtcataagctctattatgttattctaacaagtagcaatttcacaaaatttgtatgtagatgttaacgcacatttcctttgcttcttttattagactagtgttgactttggggggggacatttattcacaaatgagaagtaggcacaaagtaaaaaatggaaccatctactaacaaggatcctttaaaactgccaagggagctctaacttgaagccacatcctacagatggcagcccaaatagcacatgggcaattggcaccatctttatatggttgagtctcctgaatattttgaatgaattctcaacaaaatgtgctagccactggggacgcaaaacaagtaagatccctgttgcaagaaattcattttatagtgagggaggttggcatggagactaaaattctcaggaaaatgagatccgtgttagattagaagtcctgatgtgaaatgggaggactcaggaaggaggatcgtctttacctgaggatttctagccagaggtcccagatgcctgggctgagaacccagcgataagggggcgttcccaaagcagacacagggataagaacagaggaggcagcagcattgcacagccccaggcacagtggcagttaggatggctggagagtaggatagttctatgggttgcccaaaaaatgtgatgcgcttcatgttttctctgactcatggatctggtagagaccatagacatgatatagactaacttccccatttttcacaagaggaaaccatccttatgacttaccttaaagttttttgttctgttttgaaggaaaccatgtgcttcatgaaacctacagttgacaagagaatgtacagctaagagaaaagcttaagaggccacactattcgcggaatggctttagaggcagatgaagtggtctttgaccacagttgattgaaccagagcacttattgcttaaagaataacagagttctagagctgggggttcttgggccatgctccgtgtgtggataaggaaagaaatactgtttctgggactctcccacagtcacaaagctgttttcactgtggcccctacatctcttaacttttgctattactcctatgctgccttccggattactgctgtctatcttcttgctccactcactgaagatcctattataatcccatgaaaatgtaaattacagtttacttgggagagccagattttctctgtgctcttgagttttttattcattcaagaaaccttgggccaccgctttgtacatagcaccgtgctaggctctgggatcccaaatggacccttttaactttctgaagatgggaccgtcccctggaggaaagtcattcctgcctaatccatcgagagaaagaggcttacgaaaaactttgcctctgatgctcagccccacccccaaatagcacacaagcttgttaaccccacctcttacaaaatgtttagattctgtaggtgttaaaagcctttctggaagtattgcattctgccgtgtttataggtgttcactttcctccagagctgattaactactgacatgacttggctttctcatccagaaattatggaaacagggtctgtcagtggcaggaggccgtgctgtgttttacttggatgacacaatgcagtttacttgcctcttcatacccatgcatgctgctcaccctagacaatgacatataagccgtatatagatcaatgtccacatatatatacacacacacatatatatatataaagtgtaacaaggaacactaaaacagtgttgattcttgtctctgaagacaaataattaaaccttttttttcccaactaaagaatggatttaattaaactatgtattgaaaaaaaagtagcctaagtgttagagatggtgaatatattccattttagttaaagaacaaatttcctgaattttaagcattcagtgagctgccaattttgattttgtgttgctctttacccaaattattttttctttgtttttctttttttgggggaggaggggaaaaaagcagcaatactgtgtttggaaattatactctgtatctggttttcctgtgtatgttaaccacttaaatgttattatcctgctttggttttagagtgattgtgaggcattcaatgcaagtatacagttattttctcattaaaatccaatgtgtgttgagtttttataaa

SEQ ID NO: 220 - DNA, 2352 bp, Homo sapiens
ttgtttggaattaaacttctagcaatcatttacctttatggttctcttaacttcaggtcacactgttgtttagtcaatgtgagaatctttcagatgttctgcactttgcaaaaggatattcacagccaatgtgtgcggcagtgaaggacacttgttgattccttatttattgtctgctgttccagggaccggggactagaggtgaataaagccttgtttgggctgtctaggatgttgtgatcgacacaggaaacagacatgaaagccaaattggcgcagtgggtgaagtattgtaatactggtctctgtttatgatatatggaagaagtttcctagtagcagggtgggtgagagagtccatcatcattgcagattggtgcctctgtggacatgcaggtatgttaggccagaggtggggagtgggagagagagggagagagagagcacgacaaagagagagagagagagtgagcaagagagagggagggagagagacagagagagagagagagagagagagagtgagcaagagagagggagggagagagacagagagagagagagagagagaggttttgaaagcattgatatggggtctacatattccccccggcccccattccctattatcatagaagcatgctgccctccaaggcttttgaatttgccaccgtgaagagcatgcatggaatcttcggctgtggccttgcattgccccctgtcttcacagcggagcttctttatctgacccgtgcatgtgcctctgatgagcagcccttcatcacagctctgcggcctcctcctaggcccccgccttcagctctccagttcatttcccgccttgttcccattgccacctgcgggcttggagggccacctgacattctgtcctttgggtcccctgtgactccagagctccttcccttctggggcgcccacatctgcgacacacttgtttgcccagtgcattttctacacttagagttcctctcgtgctctcatatttccatttaaagccctctcgagaggtctgtctcctgccagcagcattccttctagtttactagaactccatttctcatcctgccaggaatccagccgtggagtgagcttcagcaagcctctctgcagtctcttgtctgctccaaaactgtggcctctggttgtgagaaatgggcatcctgagtcagtgagagcagtagttagcttgcagcagcttcccctctccccctgagtgagcctttcttcctcttcctcctctttcattcagcctcatcctgcgttgggtccatttgacagataatggcaccttgaggccttgtcttttgcatggcatctgtgcctgactggtcagaaattacttgtgaagcaacatagggggttgttggttgggtccacttttaggatgaagtcagaagggatcgtgagtgatgcttggccaataagaatgtattgatttgatttactaattaatttcatttccagacaccaatatatgcatagccttgtttgaagaaaattaaggagaaccattttgtaaatggcaatgagtgtaagacacttaactatcttcctgctctccctggcgtgggcttccgcgctccctgactctgcttttattaaaggtgtctgggaaggcatttgtccttcggcttcccagctggcttcttgccttctcactcactgcctcccgtagcctgtgggcagaatccctcaccgtgcccaccttgccctgctctcgtctgacctcacctctgtttccaggatttgctatggctgtcccctgccagtcatgctctgtgcttgctactctgagtgtgtccctggtcccactctcttgcagcctctgtgtcttagcacatgctgccctgatggcccaagggcccttcccctttgtttctgtctggggaatgttctgtctcctctttcttgaacctccttatattccctcaagaagacttaaggcaaaaacaaacctgaacttactatgtgtggtatttttgtgttataagtgtaggacctagtcatagtaacacatttcaaaaatatggaaccgtataaagaaaatgagcatcactcataaatcactatttagacacaagcattgtttacgtttctaatattctttctttagtggtgcttttcatgattttatgtgcatttgcattttactgactaaatattactatacaaacattttcatatcttgccacttcacctaacaatacagcacaagcagcttctcatggcattaagaattgtttgtggcgtgaacccgggaggcggagcttgcagtgagccgagatcgcgccactgcactccagcctgggcgacagagcgagactccgtctc

SEQ ID NO: 221 - DNA, 5583 bp, Homo sapiens; identical to SEQ ID NO: 55

SEQ ID NO: 222 - DNA, 7646 bp, Homo sapiens
agaatgggaaactgccttgggagaagccccaagtgagcccaagggcgcagagcagaaggaccctggagtgtaagagcctagattgcaagcctggcaggaggagccggaagaattaacctcgagtctgcacgcttttaagaacaaggcctttaaaaaatccaaagtgtgtggagtttgcaaacaaattattgacggtcaaggtatttcatgccgagcctgcaagtattcctgccacaagaaatgtgaagccaaggtggtgattccctgcggtgtgcaagtccgactggaacaggctccagggagttccacgctgtccagttctctctgccgtgataaacctctgcggcccgtcatcctgagtcccaccatggaggagggccatgggctggacctcacttacatcacggagcgcatcatcgctgtgtccttccctgccggctgctctgaggagtcctacctgcacaacctacaggaggtcacgcgcatgctcaagtccaagcacggggacaactacctggtattaaacctttcagaaaagagatatgaccttacgaagcttaacccaaagatcatggatgtgggctggccagagctccacgcaccgcccctggataagatgtgtaccatatgcaaggcgcaggagtcctggctgaacagcaacctccagcatgtggtcgtcattcactgcaggggcgggaaaggacgcataggagtggtcatatcatcctacatgcatttcaccaacgtctcagccagcgccgaccaggcccttgacaggtttgcaatgaagaagttttatgatgacaaagtttcagctttaatgcagccttcccaaaaacggtatgttcagttcctcagtgggctcctgtccggatcggtgaaaatgaatgcctctcccctgttcctgcattttgtcatcctccacggcacccccaacttcgacacaggtggagtgtgccggccctttctgaagctctaccaagccatgcagcctgtgtacacctccgggatctacaacgttggcccagaaaaccccagcaggatctgcatcgtcatcgagccggcccagcttctgaagggagatgtcatggtgaaatgctaccacaagaaataccgctcggccacccgtgacgtcattttccgcctgcagtttcacactggggctgtgcagggctacgggctggtgtttgggaaggaggatctggacaatgccagcaaagatgaccgttttcctgactatgggaaggttgaattagtcttctctgccacgcctgagaagattcaagggtccgaacacttgtacaacgaccacggtgtgattgtggactacaacacaacagacccactgatacgctgggactcgtacgagaacctcagtgcagatggagaagtgctacacacgcagggccctgtcgatggcagcctttacgcgaaggtgaggaagaaaagctcctcggatcctggcatcccaggtggcccccaggcaatcccggccaccaacagcccagaccacagtgaccacaccttgtctgtcagcagtgactccggccactctacagcctctgccaggacggataagacggaagagcgcctggccccaggaaccaggaggggcctgagtgcccaggagaaggcagagttggaccagctgctcagtggctttggcctggaagatcctggaagctccctcaaggaaatgactgatgctcgaagcaagtacagtgggacccgccacgtggtgccagcccaggttcacgtgaatggagacgctgctctgaaggatcgggagacagacattctggatgacgagatgccccaccacgacctgcacagtgtggacagccttgggaccctgtcctcctcggaagggcctcagtcggcccacctgggtcccttcacctgccacaagagcagccagaactcactcctatctgacggttttggcagcaacgttggtgaagatccgcagggcaccctcgttccggacctgggccttggcatggacggcccctatgagcgggagcggacttttgggagtcgagagcccaagcagccccagcccctgctgagaaagccctcagtgtccgcccagatgcaggcctatgggcagagcagctactccacacagacctgggtgcgccagcagcagatggttgtagctcaccagtatagcttcgccccagatggggaggcccggctggtgagccgctgccctgcagacaatcctggcctcgtccaggcccagcccagagtgccactcacccccacccgagggaccagcagtagggtggctgtccagaggggtgtaggcagtgggccacatccccctgacacacagcagccctctcccagcaaagcgttcaaacccaggtttccaggagaccaggttgtgaatggagccggcccagagctgagcacaggcccctccccaggctcgcccaccctggacatcgaccagtccatcgagcagctcaacaggctgatcctggagctggatcccaccttcgagcccatccctacccacatgaacgccctcggtagccaggccaatggctctgtgtctccagacagcgtgggaggtgggctccgggcaagcagcaggctgcctgacacaggagagggccccagcagggccaccgggcggcaaggctcctctgctgaacagcccctgggcgggagactcaggaagctgagcctggggcagtacgacaacgatgctggggggcagctgcccttctccaaatgtgcatggggaaaggctggtgtggactatgccccaaacctgccgccattcccctcaccagcggacgtcaaagagacgatgacccctggctatccccaggacctcgatattatcgatggcagaattttaagtagcaaggagtccatgtgttcaactccagcatttcctgtgtctccagagacaccgtatgtgaaaacagcgctgcgccatcctccgttcagcccacctgagcccccgctgagcagcccagccagtcagcacaaaggaggacgtgaaccacgaagctgccctgagacgctcactcacgctgtggggatgtcagagagccccatcggacccaaatccacgatgctccgggctgatgcgtcctcgacgccctcctttcagcaggcttttgcttcttcctgcaccatttccagcaacggccctgggcagaggagagagagctcctcttctgcagaacgccagtgggtggagagcagccccaagcccatggtttccctgctggggagcggccggcccaccggaagtcccctcagcgctgagttctccggtaccaggaaggactccccagtgctgtcctgcttcccgccgtcagagctccaggctcctttccacagccatgagctgtccctagcagagccaccggactccctggcgcctcccagcagccaggccttcctgggcttcggcaccgccccagtgggaagtggccttccgcccgaggaggacctgggggccttgctggccaattctcatggagcgtcaccgacccccagcatcccgctgacagcgacaggggctgccgacaatggcttcctgtcccacaactttctcacggtggcgcctggacacagcagccaccacagtccaggcctgcagggccagggtgtgaccctgcccgggcagccacccctccctgagaagaagcgggcctcggagggggatcgttctttgggctcagtctctccctcctccagtggcttctccagcccgcacagcgggagcaccatcagtatccccttcccaaatgtccttcccgacttttccaaggcttcagaagcggcctcacctctgccagatagtccaggtgataaacttgtgatcgtgaaatttgttcaagacacttccaagttctggtacaaggcggatatttcaagagaacaagccatcgccatgttgaaggacaaggagccgggctcattcattgttcgagacagccattccttccgaggggcctatggcctggccatgaaggtggccacgcccccaccttcagtcctgcagctgaacaagaaagctggagatttggccaatgaactcgtccggcactttttgatcgagtgtaccccgaagggagtgcggttgaaagggtgctcgaatgaaccatatttcgggagcctgacggccttggtgtgccagcattccatcacgcccttggccttgccgtgcaagctgcttatcccagagagagatccattggaggaaatagcagaaagttctccccagacggcagccaattcagcagctgagctgttgaagcagggggcagcctgcaatgtgtggtacttgaactctgtggagatggagtccctcaccggccaccaggcgatccagaaggccctgagcatcaccctggtccaggagcctccacctgtgtccacagttgtgcacttcaaggtgtcagcccagggcatcaccctgacagacaatcagaggaagctcttcttccggaggcattaccccgtgaacagtgtgattttctgtgccttggacccacaagacaggaagtggatcaaagatggcccttcctcaaaagtctttggatttgtggcccggaagcagggcagtgccacggataatgtgtgccacctgtttgcagagcatgaccctgagcagcctgccagtgccattgtcaacttcgtatcaaaggtcatgattggttccccaaagaaggtctgagaactcccctccctccctggacccaccgatgcctctcgaagccctggagacagccgttgggtgagggtggggcccccactttttaccaaactagtaaacctgacattccaggcccatgaggggaaagaggatcttccagctctgcaaaaacaagaacaaacaacatcaccgtgaattggcctttcctgaaagtgacttatctgacacatctctgtagccacatgctttttgggtagaagaagctgggcatgggtgcaccccaccccctagggtccccatgggaaagggacatgcaaggaaacagcacagaacacgaggtggtccccatgtccctggcacactagcattccgggggatgaggaatccccagcccttgaggcagaggtgccgagtgactgccatgcttcgcccgtccgcatgggcgcttctgtccagctgcacccgaggccgggggtttccctcacctcggtcttcccaagatggagatgctaacgaaactgagaagggggcgtatgtttgacgaaggtttgtgcaagtcaggcccttctggaacacagcagggcctacaacgaggggcctttgcgatgggctgtgaggatgggggtggtgggaagaattggccacgttagagaccccatgccaccccaccatggtgagtgctctgtgcctcctgctcacctgtggtgagctgggcgagctgggcgagctgggcgagctgggctggggagagcctgtgaggaccgagaggagaaatgagaagaaggaacaaaaatattatttctatgtaatttatattttacttatgccaaattatttatgataatttgccattgctatactgtaccagtgtcaaatgctgcagcctgccaagctgtgattttgtgaggcttgtccctatgtaggatgcaccgcaggcccctggccactgaaagagtgtgcagtggactgtgggtctcccatatgcggtgccgcccaaaggtggctttgcctcaagcaacctaccctgatgttttactcattggaatgtttttccccgattgtggatgacttcttttctgatggagagagtccaggagggatggaaaactcctggatttaagctcagcatcccccacatgggcttttcgatcatcttcaggcctgaagctgcacgacctgaagttcgcctgcatttatcagccctctttgtgctgctccttgccaccttggggttcctgctggggaccatgtgtggttgtggcatgtgtgagcagaagggaggatgaggaaaaagagaagaaaccccggtactgacaagctgtttttgagtgccactgtttgccatcatctaagccactgaatcaagtgtatttcaggcttatttcaacattccaatgccctggttttcctgcttgaatctgttcgtggtcaaaggtttgggggaatttgtgaccctggaacatccccagagtgaaagatggagctgggccacatcagaataaggccttggccccatcctctcacagcctaggtgctctgcaggcatgctgactgtcctgattgcgatccagcccgaaattccctcctctgctttcaaaagtcaaatcccccattcttaggccacactggtgtcacaagctcctgtcagggagctggggtttgggaatgtgctttgtgaactctgctttaaagtgaggggccgaggaaaacttagaaacaggcagagttggaagcagccaaatcacagtgggtgttgtgtgtgtgtgcgtgtgtgcatgcgtgcgtgtatgcgtgtgtgaaagcaggtggaccattccactttttagctcctattgatgcaccaaaccaagtgcctcatttctgtgccaaatgtttgccttggtcgttgtggacctccttctctaacttgcggtggcatgactgtcaggaggtgctggcattttcagcagatcctcatgtgttgaccctgatgtctttagcagaggcctctagcatctcggtttttcatccactgcaggaatgtggccacagggagcagaggtttgtactttccccaagaggtcctcatcctgagacggtctctacccatgtttaacccaaagagtgcaggccaggttccttatccttctgatgaaggatgagagagctcatttagaagtcagagcaaactagggtctcagtattgagaaacgcagcctgccagggaatcacagagacatcggggtgcccgcgatggccctcatgaagccatgcctcgacggcattcaggaagccctgcaaacgtgctttttgaactcattggccaggtgtgatttttacacaaggtaaacgtggtcaagggcatcggggaatttgctccaagcagatagctccctctgaggaaccaaaggaagcaagtttccacgatttctgaagagctggtataggaagtttctttcttccttttgtgttacatgtgcattaaacagaacaagctgtgtgtcatcacagattgtactgtgggctcagaaaccgtgagagagcccccaccgtggacaccggctctagggccacaggaaaaggaacgtttccaggcattttgtctccagggctcccgctggacaggcacgtactgccctggggagtaaatgcggagagttcacgaactgtgcccaacgcatgttatagccagggtcctactaactactcagtaaaagaacgtattgttgtattcctccagtgttaagctatagccatgttaaaagtcactgtgcatttattctcagcatcaaataccttgtaacgtcttctctgccttgttagtgcatatttttacttttctgatactgtaaagaatatatccagtatgtaaatgaatgttctataaatcttttgtatagtcattttctctgctccttaaatatcatctctattcagagtataataaaattatgaacttggtaaaaaaaaaaaaaaaaaaaaa

SEQ ID NO: 223 - DNA, 12684 bp, Homo sapiens; identical to SEQ ID NO: 74

SEQ ID NO: 224 - DNA, 2643 bp, Homo sapiens
gcttcagttaccagccggctacgtcgcgcctgcgctttgacccccagtttgcgccccaactccggtcgtgcggccgcccggggagggctctgcagttgcgcagcttgctccccggcccttttcccctccgctccccgccgcctcctgacgccgggcgtgacgtcaccacgcccggcggccgccattacagagagccgagctctggagcctcagcgagcggaggaggaggcgcagcggccgacggccgagtactgcggtgagagccagcgggccagcgccagcctcaacagccgccagaagtacacgaggaaccggcggcggcgtgtgcgtgtaggcccgtgtgcgggcggcggcgcgggagcagcgcggagcggcagccggctggggcgggtggcatcatggacgagaaggtgttcaccaaggagctggaccagtggatcgagcagctgaacgagtgcaagcagctgtccgagtcccaggtcaagagcctctgcgagaaggctaaagaaatcctgacaaaagaatccaacgtgcaagaggttcgatgtccagttactgtctgtggagatgtgcatgggcaatttcatgatctcatggaactgtttagaattggtggcaaatcaccagatacaaattacttgtttatgggagattatgttgacagaggatattattcagttgaaacagttacactgcttgtagctcttaaggttcgttaccgtgaacgcatcaccattcttcgagggaatcatgagagcagacagatcacacaagtttatggtttctatgatgaatgtttaagaaaatatggaaatgcaaatgtttggaaatattttacagatctttttgactatcttcctctcactgccttggtggatgggcagatcttctgtctacatggtggtctctcgccatctatagatacactggatcatatcagagcacttgatcgcctacaagaagttccccatgagggtccaatgtgtgacttgctgtggtcagatccagatgaccgtggtggttggggtatatctcctcgaggagctggttacacctttgggcaagatatttctgagacatttaatcatgccaatggcctcacgttggtgtctagagctcaccagctagtgatggagggatataactggtgccatgaccggaatgtagtaacgattttcagtgctccaaactattgttatcgttgtggtaaccaagctgcaatcatggaacttgacgatactctaaaatactctttcttgcagtttgacccagcacctcgtagaggcgagccacatgttactcgtcgtaccccagactacttcctgtaatgaaattttaaacttgtacagtattgccatgaaccatatatcgacctaatggaaatgggaagagcaacagtaactccaaagtgtcagaaaatagttaacattcaaaaaacttgttttcacatggaccaaaagatgtgccatataaaaatacaaagcctcttgtcatcaacagccgtgaccactttagaatgaaccagttcattgcatgctgaagcgacattgttggtcaagaaaccagtttctggcatagcgctatttgtagttacttttgctttctctgagagactgcagataataagatgtaaacattaacacctcgtgaatacaatttaacttccatttagctatagctttactcagcatgactgtagataaggatagcagcaaacaatcattggagcttaatgaacatttttaaaaataattaccaaggcctcccttctacttgtgagttttgaaattgttctttttattttcagggataccgtttaatttaattatatgatttgtctgcactcagtttattccctactcaaatctcagccccatgttgttctttgttattgtcagaacctggtgagttgttttgaacagaactgttttttccccttcctgtaagacgatgtgactgcacaagagcactgcagtgtttttcataataaacttgtgaactaagaactgagaaggtcaaattttaattgtatcaatgggcaagactggtgctgtttattaaaaaagttaaatcaattgagtaaattttagaatttgtagacttgtaggtaaaataaaaatcaagggcactacataacctctctggtaactccttgacattcttcagattaacttcaggatttatttgtatttcacatattacaatttgtcacattgttggtgtgcactttgtgggttcttcctgcatattaacttgtttgtaagaaaggaaatctgtgctgcttcagtaagacttaattgtaaaaccatataacttgagatttaagtctttgggttttgttttaataaaacagcatgttttcaggtagagcttaaactaaatgatgtgtttacttagtgcagtttctggttatgaatattatattgctatgtgtatattatatggactctttaaaatgattgacagattggcaaattcttaaatctttgtacattgttgagtcatatgttcttagagttaaatttgtctcagataagaaagtgttaaagcattagcctgtgtcaagttctttgagtgatactagtgaaaccaaatagaaaactattgttggatcatgatttagtcttatgtacattcacccga

SEQ ID NO: 225 - DNA, 3497 bp, Homo sapiens
cggacgcggccgccgccgtcgccgccatctgtcacctccactccggcatcagcagccagtcgcccgtgtcccgcctgtctcctcggcggagcctgctgcccgtcctgccacctctctgctctgttcttgtctctgccttcattcccgaatggatctggtaggagtggcatcgcctgagcccgggacggcagcggcctggggacccagcaagtgtccatgggctattcctcaaaatacaatatcttgttctttggctgatgtaatgagtgaacagctggccaaagaattgcagttagaagaagaagctgccgtttttcctgaagttgctgttgctgaaggaccatttattactggagaaaacattgatacttccagtgaccttatgctggctcagatgctacagatggaatatgacagagaatatgatgcacagcttaggcgtgaagaaaaaaaattcaatggagatagcaaagtttccatttcctttgaaaattatcgaaaagtgcatccttatgaagacagcgatagctctgaagatgaggttgactggcaggatactcgtgatgatccctacagaccagcaaaaccggttcccactcctaaaaagggctttattggaaaaggaaaagatatcaccaccaaacatgatgaagtagtatgtgggagaaagaacacagcaagaatggaaaattttgcacctgagtttcaggtaggagatggaattggaatggatttaaaactatcaaaccatgttttcaatgctttaaaacaacatgcctactcagaagaacgtcgaagtgcccgcctacatgagaaaaaggagcattctacagcagaaaaagcagttgatcctaagacacgtttacttatgtataaaatggtcaactctggaatgttggagacaatcactggctgtattagtacaggaaaggagtctgttgtctttcatgcatatggagggagcatggaggatgaaaaggaagatagtaaagttatacctacagaatgtgccatcaaggtatttaaaacaacccttaatgaatttaagaatcgtgacaaatatattaaagatgatttcaggtttaaagatcgcttcagtaaactaaatccacgtaagatcatccgcatgtgggcagaaaaagaaatgcacaatctcgcaagaatgcagagagctggaattccttgtccaacagttgtactactgaagaaacacattttagttatgtcttttattggccatgatcaagttccagcccctaaattaaaagaagtaaagctcaatagtgaagaaatgaaagaagcctactatcaaactcttcatttgatgcggcagttatatcatgaatgtacgcttgtccatgctgacctcagtgagtataacatgctgtggcatgctggaaaggtctggttgatcgatgtcagtcagtcagtagaacctacccaccctcacggcctggagttcttgttccgggactgcaggaatgtctcgcagtttttccagaaaggaggagtcaaggaagcccttagtgaacgagaactcttcaatgctgtttcaggcttaaacatcacagcagataatgaagctgattttttagctgagatagaagctttggagaaaatgaatgaagatcacgttcagaagaatggaaggaaagctgcttcatttttgaaagatgatggagacccaccactactatatgatgaatagcactaatacccactgcttcagtgttaacacagcagtgattgtcagctgccaatagcaaatgaagttatgggtgacttgaaataccaaaacctgaggagtgggcaatggtgcttctgtgcttttcccccttgtaacccatgtgccagatgtgtggaatttttagctcagcattgagagaataaaatgtcactacctctcatcttatgaacaggataatataattctttaacagctataggttatctggctgaagtagacctaattttatgtgacttgtggtgtaaaatgtcttgatgataatttttaaaacttgggtaacacttccaaatatgggaggaaaggacagatgtgtttacaagggaggattttacaacatacttgctttattcacctccctgttttgtgttgcgtctttccttgaatattttattggcccagagttagcctttctcaattatgtttccagactgtggccgtgattctaaaggaaaatgtgtgctctttagtgggtagaacaaatggaaatttggtttcagaatggctgacagaaatcgacataagtcatgtaatttttgttgatatatcatgaaaatgaacagaattctttttccatacttatatctaagaaaaggcatcataggtttctgaaagagataactatataacagctttttaactatccagtcaactttcagcttttctacatttaggtaaaatggttaggatataactcatggtgtggctaatctacatttatcaataaaatgtaaattatctgaaaggacagaatataagatttaaccatgtttgacgtattttaatttagttaatgaagcaaaattcagtttatatttcactagaactgtgtacttgattgattttcagagaaatatcacaaattagaaatattaaatctaaggatgaaaggtatatataaaacaatttgggggccaggcacgatggctcaaacctgtaatcccagcactttgggagaccaaggcgggtggatcacttgaggtcaggagttcaagaccagcctgggcaacatggcgaaaccctgtctctactaaaaatacaaaaattagccgggtgtggtggcacttctctgtaatctcagcttctcaggaggctgagacaggagaatcgcttgaacccgggaggcagaggttgcagtgagctgagatcatgccactgcactccggcctaggtgacagagggaaactccatctccaggaaaaaaaaaaaaaaacccaatttggataccaaattaatcaactaatttgagctatctggccttactcttagtagtttttagtacgtgctggacaccacttttaaaaagcaatcactgtgctagaaaagtatattggctttgttaggattaaagttcattaacttcaatgtaatcatgcctcctattactgaagtcagattggaaccactaaagatccaaactttctgtctggtaatagaaagtaaaaatctagacatcatttacatttgagaagctgtttttaacattattttaaaatgccaaatatgttctttctagaaaaatatttatttttgtttttgttggatagcttttaattacatttcagagaggtgtaattttgggtagatgctcattacatttttgaaaggtttatgattccaaaataaagatttatatgactggtgatactggctttacagaaatttcagagaactaatttttaaaatctttagcatttaaaactttttttgttttgttttctgacatattctgacaaagagcagcaaaccactg

SEQ ID NO: 226 - DNA, 11257 bp, Homo sapiens
tggcttcagcccggccgccgccaggcgttggcatcgccggggagagccttccggactccgggcggcggctggctgggggcgcgttccgaggcgccctcaggcagggcgcgggggcagagcctcgcctgggttctggaggctgcggggccatcgctccagatgcgaaagccatggagttgagctgcagcgaagcacctctttacgggcagatgatgatctatgcgaagtttgacaaaaatgtgtatcttcctgaagatgctgagttttactttacttatgacggatctcatcagcgacatgtcatgattgcagagcgcatcgaggataacgttctccagtccagcgtcccaggccatgggcttcaggagacggtgacggtatctgtgtgcctctgctcggaaggttactctccggtgaccatgggctctggctcagtgacctacgtggacaacatggcttgcaggctggctcgtctgctggtgacgcaggccaatcgcctcacagcctgcagccaccagaccctgctgaccccatttgccttgacggcaggagcactgcctgccttggatgaggagctcgtgctggctctgacccatctggaattgcctctagagtggactgtgttgggaagttcttcacttgaagtatcttctcacagagaatctcttctacacctggctatgagatggggcctggctaaactttcccagttcttcttgtgtctcccggggggagtccaggccttggctttacccaacgaagagggtgccacaccattagacttagctttacgtgaaggacactccaagctggtggaagacgtcacaaattttcagggcagatggtccccaagcttctcccgagtgcagctcagtgaagaagcctccttgcattacattcactcatcggaaacgctgaccctgaccctgaaccacacagccgagcatttgttggaggcagatattaaactcttccggaaatacttttgggatagagcctttcttgtcaaggcctttgagccagaagccaggccagaggaaagaacagctatgccctccagcggtgcagaaactgaagaagagattaagaattcagtgtccagcagatcagcagctgaaaaggaagatataaagcgtgtcaaaagcctggtggttcaacacaatgaacatgaagaccagcacagcctagatttggatcgctccttcgatatcctaaaaaaatccaagccgccctcgacattgcttgctgcaggccggctttcagacatgctgaatggaggtgatgaagtctacgctaactgtatggtgattgatcaggttggtgatttggatatcagctatattaatatagagggaatcactgccactaccagccctgaatccagaggttgcactctgtggcctcagagcagcaaacacacccttcctacagaaaccagtcccagtgtgtacccacttagtgaaaatgtcgaagggacagcacacactgaagcccagcagtccttcatgtcaccatcaagttcgtgtgcttccaacttgaatctttcttttggttggcatggatttgaaaaggaacaaagtcatctaaagaaaagaagttctagccttgatgccttggacgccgacagtgaaggggaagggcattctgagccatcccacatctgttacactccagggtctcagagctcctcaagaactgggattcctagtggggatgaattggactcttttgagactaacactgaaccggattttaatatctccagggctgaatcccttcctctatcaagtaatctacagtcgaaggaatcactgctttctggagttcgctcacgttcttattcttgctcatcacccaaaatttctttaggaaaaactcgtttggtgcgtgaattaacagtatgcagttcaagtgaagagcaaagagcttacagcttatcggagccaccaagagaaaacagaattcaggaagaagaatgggataaatacatcatacctgccaaatcagagtctgaaaaatataaagtgagtcgaactttcagtttcctcatgaataggatgactagccctcggaataaatcaaagacaaaaagcaaggatgccaaagataaagagaagctgaatcgacatcagtttgccccaggaacattctctggggttctgcagtgtttggtttgtgataaaacactcctggggaaagagtcactgcagtgttctaactgtaatgcaaatgtgcacaaaggttgtaaagatgctgcgcctgcatgcaccaagaaattccaagagaaatataacaagaacaaaccacagaccatccttggaaattcttcatttagagacatcccacagcctggtctctccttgcacccttcttcctccgtgcctgttggattgccgactggaaggagggagactgtgggacaggtccatccattgtccagaagtgttccaggcaccaccttggaaagcttcaggaggtcagccacatccttggagtctgagagtgaccataacagctgcagaagcaggtctcattctgatgagctgctacagtccatgggctcttctccctctacagagtctttcataatggaagatgttgtggattcttctctgtggagtgacctcagcagtgatgcccaggagtttgaagcagaatcttggagtcttgtggtggatccctcattttgtaataggcaggagaaggatgtcatcaaaagacaggatgtcatttttgagctaatgcaaacagagatgcatcacatccagaccctgttcatcatgtctgagatcttcaggaaaggcatgaaagaggagctgcagctggaccacagcaccgtggataaaattttcccctgtttagatgagttgcttgaaatccacaggcatttcttctacagtatgaaggaacgaaggcaggaatcctgtgctggcagcgacaggaattttgtgatcgaccgaattggagatattttggtacaacagttttcagaagaaaatgcaagtaaaatgaagaaaatatatggagaattctgttgccatcataaagaagctgttaacctctttaaagaactccagcagaataaaaagtttcagaattttattaagctccgaaatagtaatcttttggctcgacgccgaggaattccagaatgcattctgttggtcactcagcgtattacaaaataccctgtcttggtggaaaggatattgcagtacacaaaggaaagaactgaggaacataaagacttacgcaaagcgctttgcttaattaaagacatgattgcaacagtggatttaaaagtcaatgaatatgagaaaaaccaaaaatggcttgagatcctaaataagattgaaaacaaaacatacacgaagctcaaaaatggacatgtgtttaggaagcaggcactgatgagtgaagaaaggactctgttatatgatggccttgtttactggaaaactgctacaggtcgtttcaaagatatcctagctctacttctaactgatgtgctgctctttttacaagaaaaagaccagaaatacatctttgcagccgttgatcagaagccatcagttatttcccttcaaaagcttattgctagagaagttgctaatgaggagagaggaatgtttctgatcagtgcttcatctgctggtcctgagatgtatgaaattcacaccaattccaaggaggaacgcaataactggatgagacggatccagcaggctgtagaaagttgtcctgaagaaaaagggggaaggacaagtgaatctgatgaagacaagaggaaagctgaagccagagtggccaaaattcagcaatgtcaagaaatactcactaaccaagaccaacaaatttgtgcgtatttggaggagaagctgcatatctatgctgaacttggagaactgagcggatttgaggacgtccatctagagccccacctccttattaaacctgacccaggcgagcctccccaggcagcctcattactggcagcagcactgaaagaagctgagagcctacaagttgcagtgaaggcctcacagatgggcgccgtgagtcaatcatgtgaggacagttgtggagactctgtcttggcggacacactcagttctcatgatgtaccaggatcaccgactgcctgtaagtgaaaatgcaggccttggcaatgagcctgagcacagtccctggagcttacagtggtcacgtaaagtaaaggcaatgactgtctctggttgaaggggacttgatatatttttttaaattagaaaaaaactgagaataaatatgctagcctaaatgaatatcataggcatataataatgacactggggtttcaagtatgaggatctaaagagtagttggtgggttatactgctctgtttgccggccaaatatcggaccttccccaacccctaccctgcctcatttttgatatgatttattcattacagttttgaaagaactttttaacttttcaggttttttaaaaaaggagtccctgcggtcaattacagaacaagcccttaaacctaatctcatgtgcatcaactgagaaaacaactcagaaaaccagaaatatacacacggctccctccgtctccctcctttctctctccctctctctttctctctctctcacacacacgaagtttggtggtatggttaaagcagaagtgccagaaaattcttgatctgtgccatcctacactttagttcatgtcagaattcatttatgaaaacattgtttcaaaacattttaaatataaaaaaaaatagaatgtagagatttggtttaggtaatttccccgaacctagctatcctgttatatgtatagttgtaggctacttagttccataaaggtttctaagataagagcataaagagtatacttttcatcctgtgcaggtggtaacaaccttacttccacaaggtcttatgtgcgtaagataaaatggataaaatgtcttcagtagttagagatcagaagattaaattgaactcaagattggaagattaaattgaactcagaacttctttaacaacatcccttgattaattaagatatatagatgcagtatagctttttaattctatacttcttttttttttcttttttaaacatcagcaccactaattatcttcctctctcaagttctgctttatctaatcctgagtttctagtttcagaatgcgcacgtatgtttttcattttgacacagcccagattcatcaggggagttgtactgccctgggtgatttccttttaaaagaagaacctcattatgccattgaggagtctctgtctaaaaatacgtgcagggatctgctgagggatctgctgctctcagcctcgccccagggacagctggagaggctcccctctgcagctgcccgagcccgcggtcgtgccttccctcccttcaggccaggcagtgaaggtctccttgtctgtatccacatctctcatgactggggagagtttcaaagggacacccgtggcatttgccagaaccattgagaggctctttagaggggtctgatgtcgggattcaggtagaggaagtaccgaagctggctggtggggtcctgtaccccaaggcctcttcagttctgggtcagactggaacatggtgctatgagagtttgattctctttataaagttgttcaaggcacaaggctagttctaaatgaaggtctacaactgtgactgaatgggtcggttctgcaaatgacttggagaactgggctcttcttcatcaggcttatgtcagcctgaggttataagccaagcagacagctctattttcagtcttcagtatacatgatgagtatcttctacttctaggaaagttctgttcactggagaccctctggcccaccctgaaattggatacagggacagggacctgatctgtgttttattcttctgccttgtcatcagcttctttcccatttgattttcctaatttctatgagggagtgagaaacagagtggtgaattctttagtgatgcctttggccactctttaagagttaggaatagcacccaatagtagaaccatttttcaaatgacagagaaacctataaaatgtccctcattgtaagtgaataagtgctgatcagcttgaacaaaatggacttgtttttagctgatctcatctgaagccgtttccgtttagacaaaaacttctttgtattagaagaggtctttgaaatcctagaggactctcattttccaaagacataagtatttttattaaagaaaaaagcatttcctatattggaaataaagttttaaaaagacacaataaaaattatacaaacaaacagtgtcataaagtgaatatcgattttgtcagggtctggattggacatggttctaataaaacactgttttgggctttgaaaattctagttttaatcagtgcaaggtgggcacagtttaagttttaactgagttcacatgggtaaagaaataaaatcctgccaacagagatttaatggatgaagtgaaatctgtatttggtacttaaaaatatttcgggactagtttctatgttttcatagtttaaatacatagtatttgtaaatctaaagcataacaagaaatgtgagaaaaacaacacatttagaaattgttaaaaaataagttattcagagatagggacaggttcttggtttgtatgactatgagaccgtgaagtattagccatctccgccttcctagaaagatgtctccctcctgcttcggactcctccttcctcctaaaccttgtttatcgtctgctgctcttgcactggccacaagagagactttttacagacttaagtctgccaagagaccttgcttttgttctacagcacctgttttaaatttcacccttcccaggaggcattttcctattaagtgagagtgagatgtagattctaccctctgtaacacaaacgacacacgaacacttcagtgcaagaaagaaaagtacaaagatggtgatactttgtgcggttcgtcagttgctgtctgttagcgtgtaagccccatgtgggcagggaccacatgcattgctctgcgctcatccaagcacctcatctaagaatactcaatatgtattattttgtggtgtttcctattttgaaatatgtgttggccgtgtacagaagaacccggtgggctggccgatgtttgacgctgtcctttttgtttctgtctcgatggcgtgcttccagcattagtcacaggagggagagaaggaagaggctgttcggatgtggatcccgggatccagggtgtggtaaccgacttggccgtctctgatgcaggggagaaggtattgtgaactgatttgttagtaaacggcagcggttactgtgtataataaaatagcctcaggttctggtctgtcacggcagtcagtggggcaaaggtgcttttctgaattgttctcaattgatttaaatattcatatttaaactttctaacttatttcttcttcaaatgtgcttgcactgcctgtgtcatgtaggtgtaaacaaagcaacgattgaaaagttattaaaaagattaaaaactctcctgtgtatatgtgtgtctgtgctctctgacttctggtctttctgccctgcaaacctttgcttctcacccactatgtctggcagctctggcacccgggggcccttttgcaaccagatggcgccaaagtaattgaaacaccttttactttggaatattcttgcttctttcaccttccttgaccctcctctccttgcagagttgatttcctgtcaccacccacatttcacctactttttttgtggttaatttttaattaatctgaccagtttttgcttggggcacagcgattcccaaagggaatcctcttttttgacttactgctatagacatagatattaactctctctttaagaattaaatacataaaacttcctattaatgtctactgaaagtgagatgtcagaaatagggaaggaataaaatatgattctgggaggtggctagttggcctcttcctgcttgtcagggctccagagtttagctttatctaaaattgaattaggtacattaataggtgccaatatgtgtcaatgtgaaaaaatggcaaatgtcagatcttctcacatatacaacatattttacatattatatactttttgtgtatattacataagactgagaaatcaagtcaaggacttttaaaatccagagaaaagacagctgtgactgagtgttcttttttaaacttcagaggccaaaatgagcataggaatgtaatattttactccttctgattgtaagctttctaatgtattgcttcttaaaatgttcctgcttttcatcacttttaagtgtgaagtttgtggtgtccaactgtgttaatagaaaagagagagtgaattggacagtaataatttaatcttgaacgcaaagttgggtggctcctacccctaaagtctccctcttccactccaattcagctacaggtagataattgaggttaagtgtctgggttcttctttggattaagctatctgcaaaattttttgcttaataaggcattttgaaagattaatacattaataaacccaggtaaagggcaggatcacttgaaatcaaacttttaaaaggtgtataatggatattttgtcattagcttcctctacaaggtaaggttagaacaaatttctgaaagaatattaaaaaatgaaatctgactcaaatgcagaaataatggataaatcgccaactgcagttttaaacatttaccacaaggtggcagaacaactccattaaaaacgcgaaatttcctgtcttgtgtcaaacctagtggcttttgggcataagtaaccgcgggtagcacagtccaactcatttctatggttctaatttttatagactataaaaactctgtgccatatggtcttactacagaagcagtggagtgtggatgggccacgacagagccagaagagcagcgagaacgccaaccatccctctagggcgggggttcttagagcctgttctctcccatagggtttggcacagatctaatgtctttaagcttcatctccattttcagcctctgtcttttctctatcagaggggctgcttacgagtgaaatctttaattggcagtccaagggaagcggaggtctggctagctcatcctggcatcatcagcctaaactaattgaatttaacaagttcaaaattacccgaggacatgaccatggctggctgctttttatggcttaaaattagatgagacagtaggcccttgaggacagggcatctgatggtctcccatagcgtaaggtgtgaagtttacagtgggtgatcgatatttatttattgaatggcgtgccatcgagttcaactgggagtcattcacttgttgagtgtccgtgctatgtcaagcatcattcttataatatggagcacatggacaaagtctcgctactcactggtttgcatcctagggagagaaggccgacaataaatgaataaacaagtgttcaattatggaggctgcaaaccatcactatccacgtgtgcccttaatgtgtgctgtggaagagacaaagaacaaggcatagaccctctccctaaagaacagacggtctcctgtggctggttcgtggcctctgctgctagtacttctactatggcagtcactggtctggtgatctctgactgtggtgggatctagagcagcccagctacgcgcgccactatggccaccgtctgagtctggtttcttttcccaactgctgtatatgttgatatcgtgaatctcaaacattgagaaaaggagttaaggccagacatgatattctttctttaactttcaatctgtcctctagaatataagaggtcagcctgacccaaaagacaacttcagtctgggcacagagaactcaattcacattgtggtttgcacaaggtaaatgttgttacttgagttttcagggtgtccttactgtcatcccttgttgttttaaggggtgattgggtgaaaattgccatccatctcaaacatcgactttgcgtgaaggacgctcttgttgtcaagtgtttgtttgattctataggcttttatttctgggaggaaactgagtcagtatagataaggtaatcaagtttagagatagcaaagtgatttacccaaggtcatacattttgggacactgcagggcagcttttcagaagtagaatggttattcattttcttgttttttatgtattttaggtggaatgtagaaattttccaggttcttcacaatcagagattatacaagccatacagaatttaacccgtctcttatacagccttcaggtaactatcctcctctaatctttgaccttgtgaatggttctcttaatgcaattctctttgatgattcccagactttaaaaatgagaacaagtgagaggtagggaatgatcttaaaagaatgacaaccttctaagtgtgatgtgttggactcacatggttttgtaatcagaggcaacaccatgactacattttataccattcttctctgaaatcataaaacagttcatatctttaaaaaatattgatgaatatgatctggcttgacatttacaatgaaactcttaggtgagtgtagcatgacttcacattttctgatgaaaacctaaattcacacctaaaattctttgacttctccatgtggccatcagcctttagagcagttaagtaatccatatgttgctttactcttttgtttgttcatccactcaacatttattaatttattaatgttgaggggatgaacacacagtgcctgtctctgtgctgactgtgctgagggctgagcacacaaaggcaaattagccacacagcctgctctcaaatagcttactgcctttcaaggaagagcagacataaaaaagaaatcatgcttgcatttaggattaaatggttggatgatcccttaggctggggtccccaaaccccagggtgcagagtgttacctgtctgggctgcacagcaggaggtgagctgggggcaagcgagcagtaccacctgaactccgcctcctgtgagatcagtggcagcattagattcttataggagcgtgaaccctattgtgaactgtgcatgcaatctagggatctaggttgccccctccttatgagaatctaatgcttgatgatctgaggtggtacgctttcatcctgaaaccattctcaccacatcccagcccatcc

SEQ ID NO: 227 - DNA, 2676 bp, Homo sapiens
ccgatcctctccgtgggagccagcgagcctctctccctgatcttacgtgctcaagggagctcacacgttcaccaactcacccttgaagtcatctcaagaacaaaagacaactgaaagaagctgttgtgaaggcagagcagcatctgctgaagagacagaaaccagccccagaggtgtcacaggaaggcaccagcaaggacattggtctttgatttgattcagcagtcctgtcaagtataaatgtgatggctgtgctgcctggccctctgcagctgctgggagtgctgcttaccatttccctgagttccatcaggctcattcaggctggtgcctactatgggatcaagccgctgccacctcaaattcctcctcagatgccaccacaaattccacaataccagcccctgggtcagcaagtacctcacatgcctttggccaaagatggccttgccatgggcaaggagatgccccacttgcagtatggcaaagagtatccacacctaccccaatatatgaaggaaattcaaccggcgccaagaatgggcaaggaagccgtacccaagaaaggcaaagaaataccattagccagtttacgaggggaacaaggtccccgtggagagcctggcccaagaggaccacctgggccccctggtttgccaggtcatgggatacctggaattaaaggaaaaccagggccacagggatatccaggagttggaaagccaggtatgcctggaatgccagggaagccaggagccatgggcatgcctggggcaaaaggagaaattggacagaaaggggaaattgggcctatggggatcccaggaccacaaggacctccagggcctcatggacttcctggcattgggaagccaggtgggccagggttaccagggcaaccaggaccaaagggtgatcgaggacccaaaggactaccaggacctcaaggccttcggggtcctaaaggagacaagggcttcgggatgccaggtgcgccaggtgtaaaggggcctccagggatgcacggccctcccggccctgttggactgccaggagtgggcaaaccaggagtgacaggcttccctgggccccagggccccctgggaaagccaggggctccaggagaacctgggccacaaggccctattggggtaccgggggttcaaggacctcctgggatacccggaattggaaagccaggccaggatgggatcccaggccagccaggatttccaggtggcaaaggggagcaaggactgccagggctaccaggacccccaggccttccagggattgggaaaccaggcttcccaggacccaaaggtgaccggggcatgggaggtgttcctggggctcttggaccaagaggggagaaaggaccaataggtgccccaggaatagggggtcctccaggagagccaggcctgcctggaatcccaggtcctatgggccctccaggtgctattggttttcctggacccaaaggagaaggtgggattgtagggccacaggggccaccaggtcccaagggtgagccagggcttcaaggcttcccaggaaagccaggtttccttggtgaagtagggcctcctggcatgaggggtttgccaggtcccatagggcccaagggggaagctgggcaaaaaggtgtaccaggactccctggtgttccagggcttctcggacctaagggagagccaggaatcccaggggatcagggtttacagggccccccaggtatcccagggattgggggccctagtggccccattggaccacctgggattccaggccccaaaggggagccgggcctcccagggccccctgggttccctggtatagggaaacccggagtggcaggacttcatggccccccagggaagcctggtgcccttggtcctcaaggccagcctggccttccaggacccccaggccctccaggacctccaggacccccagctgtgatgccccctacaccaccaccccagggagagtatctgccagatatggggctgggaattgatggcgtgaaacccccccatgcctacggggctaagaaaggcaagaatggagggccagcctatgagatgcctgcatttaccgccgagctaaccgcacctttcccaccggtgggggccccagtgaagtttaacaaactgctgtataacggcagacagaactacaacccgcagacaggcatcttcacctgtgaggtccctggtgtctactactttgcataccacgttcactgcaaggggggcaacgtgtgggttgctctattcaagaacaacgagcccgtgatgtacacgtacgacgagtacaaaaagggcttcctggaccaggcatctgggagtgcagtgctgctgctcaggcccggagaccgggtgttcctccagatgccctcagaacaggctgcaggactgtatgccgggcagtatgtccactcctccttttcaggatatttattgtatcccatgtaaaaacaaaaaaacaaaaaacaaagaaaagaaagagattttatagaagaaaatgacacaccaaaaaatccaaatgaaaaacataattgcttcaaaacacttacacagttggaaagttatatgtaagtgaaaatttggaccattgtgtacaaataaaaactaagatgcatgtttaatactcaaaaaaaaaaaaaaaaaa

SEQ ID NO: 228 - DNA, 7065 bp, Homo sapiens
ccccgaagttgttccgcgctgggcgggcgagcggctgtgggagagcgggcggcgggccggcgggcggaccgggccggtgctggagaagtttgcgctgcggttcgtgagcgcagggtgcgggccccgccggccgctgcgcgcccgctgccatggctttccgcaggaggacgaaaagttacccgctcttcagccaggagttcgtcatccacaaccatgcggacatcggcttctgcctggtgctctgcgtcctcatcgggcttatgttcgaggtcacagccaagactgcctttctatttattttacctcagtataacattagcgtgcctacagcagacagtgagaccgtgcactaccactatggccctaaggacctggtcacaatcttgttctacatcttcatcaccatcatcttgcatgctgtggttcaggagtacattttagataaaatcagcaaacggcttcatctctccaaagtcaaacacagcaagttcaatgaatctggacagctggtcgtctttcatttcacctcggtgatttggtgcttctacgtggtggtgacggaaggatacttaacaaacccaagaagcctctgggaagactacccgcatgtgcacctccccttccaggtgaagtttttctacctatgccagctggcctactggctgcacgcacttcctgagctatacttccagaaggtacggaaggaggaaattccccgccagctccagtatatttgcctgtacctggtgcatatagctggagcatacctcttaaacctgagccgcctgggcctgatcttgctgctgctgcagtactcaactgagttcctcttccacacggctagactcttctactttgcagatgaaaacaacgagaaactgttcagtgcctgggctgctgtttttggggttacccgcctcttcatcctcacccttgccgtgctggccattggctttggactggctcgcatggaaaaccaggcatttgatcccgagaaagggaacttcaacactttgttttgcaggctctgcgtgctgctgctggtgtgtgccgcccaggcctggctcatgtggcgcttcatccactcccagctgcggcactggcgggaatactggaatgagcagagtgcaaagcggagagtcccagccacacccagactaccagccaggctcatcaagagggaatctggttaccatgaaaatggagtggtgaaggcagagaacggaacctccccacggactaagaaactcaagtctccctaaggccaaagtgctaagaacaggaatcctcttggtgggggccgagcagggggcaaggagcccaggccccctccctgcctcctccttcctgcctgtgatgctccgtctcaaacagccgaaacctgtcttgcaatggggggagggggcgtttcgctttccttcttcttggcttcctcttattcttccacaaaccattctcaataaagccaaaaatctttctctttctccccctcaggccacctcctgtcctcactcctgtcctgtgctggcttttctggaacgccaggcgcccatggctggcacctttctgcttgctctgtctcttgccttatggctgctgcttttcctttttacttcctattttcaccttatcttgcaatttttctgtctgatttttacaatgggaggggagctaagattgcagtcctgtccttcggtcccccagggcctgccggtcagaagcctggggctggtaggcccttggtggtcctcatgtggatgggcaagaagagagcggccatctcggatcataatctccttggtgctgattaactgacgagatatatgattccagttctgcatgtaccatcttgaggcacagcagccactgctcgttgtaaatgccaaggcatttggctttgggacgtgacaactcaatccagaaggatggtgtgaactcggttgggtcccgtgactcgagctcctaccagtggctggccgcggattggaagccagcctgctgtcgctctgtggggggggacacgtcttcccactgcttagagcgagagcagagcaaactgcgcagcaggcacctccagaaaggtaatggtggcagaacccacagtggagtcgacctaggcctttctccagcagtcccagtcgccattgctttttcagccattcacaagcattcaaaaccaaaccaaacagcagttcatatacctgcctgagataggctggtcctcacctccagagccagccagccccgtcaggggccaaacttactaccttgacttcatctctagctgcagaaacactaagtctcaagggcttcagccccatgctggtcccttggtgttcagggagggtcacttggaccgctgttcatctggccgcccttgttgagtgttctttggaattgtcgttttttgagcacaactacagcattttagactgcatgaaaccatgactgactgagagtcactctctgggtagatgataggcgcctttctggccccttccctcacagattctttcccctcccctccacctgaagagaaggcctccaagtccttttggtgccttgtgaggacttttagaaggggcgttcagctttaaaaagccggtcctaattacggccggacgcagtagcttacgcctgttatcccagcactttgggaggtcgaggtgggcagatcacctgaggttaggagttcaagaccagcctggccaacatggtgaaaccccatctctactaaaaatacaaaaaattaggtgtagtggcaggcacctgtaatcccagctactcgggaggctgaggcaggagaatcgcttgaacctagaaggcggaggttgcagtgagcggagattgtaccatggcactccagcctggacaacaagagcgaaattctgtctaaaaaaacaaaagtcccaattaagaacctccgaactctgttttgaggcaaaggggagtagttcttggtaggtgcaggaatagtagtgtcatttggaatactggtcatctttctgacatcacagtagaaaccaaaccttggatttagattcaaaaggggggaaatgggtcttttcatcaaggcaactccccttctccaagtcacttacatcatagataaattttagcttcccagtaactgagggatttgtttcctaacgccattggaggccttcatccctctctacgataaggttgcagaaatgggaagagctacccgtggttgcttttgattacccttaggaagtgagacagtgtttttgaaaatatgtatttcccccatttctccctctccttccctgacacttctctgggctgcacagcagaaacgttggtaaaagggcagtttggtttcaacacagcagacctgatatgggatcccttagccactttagtcaaacagccctgacagagtctataattgagttcaggccccccaccttgcctaataactgcaaatcgcatgttcagccagcagcctcctaagcccaccttcctcccccattagagaacacccatcctaggtgctctccaggctgtgtcattggcagggcttcacatgcaggaggcctctctcaggtgagtccaggttaaactgttgagttgtggcttcaacagatatgtatggcatgctgggatgtgccaggtgcctgcgttgtgccagttgctggagaggtagtgtgagcagagcagctgaaatcttgccatcaagcaaccctcattctcatgcctgtaggtttccattgctctgtcccaggacacttgcgtgccagagacgccacaacttcatgtccctgtctcttgcaagctccccgtgctgccagtacttcatgccttggatgtggtcccaccagcccagtggccggggtcagcttaggctctgcttcccagtggacgggtgtgctaagggtttattttatgtaaaaaaaaaaaaaaaaacaaaaaaaaaccctgagaccatgagtggggctggcatcttgccagcctgggcttcagggatgtttggggggggtggttagagggtagttgtagggtactttgtcacccccctccccctgccaccctccctggcacgtttatttcacagcagagccaagtctgtggcaggttgacacagactgtgttgccagagctgaaataattccacttcatcctatgagcgtgttgggctagcttgttctaattttggccactttggctgttttcttcagttttatgcattctctcctgccccaaagtgccaagccatttgtgaaggctctgccagacacctccaagcttgagagctcagcaccatgcaccaagagcaggagaaaagacgtaaacctaccccagcaactgtggcctctcgacagccctggctaactaacttacatttgtggggaagccaacagacacagcaggaggagagggaggtggcgctggtggaccaaggatctgtgctacccgctcccctccttggaggtgcagtgatgatgggagttatttttaccatccgggcgctgatagctgcactattaataaattgcatgtgttccttttgaaggtaggggatggttctgggtgagaggggagcaggctgagccggcgggggatctgctgtcctcccttttgagtcagttctaatcccatgtgtgtctgggccaccagaccgaaatggttgctgagaaacttgtctgttcatgtcccaaggcataacttcccaacatttaagaaaccccaatagacacctctgccctggccacgttcacagatccttctcttgaccggaaaccctgggaccctaagaacccctgaagcttggggtgggtgtgtgcttctggggtctcttttgggacctcctttgtcagtaccccttcttttttctaagcagctaataagaggttgggtgaaagagtgcatctcctcccaggattccacaacaaaattcttatcttccatggatgctttaattggaagtgggttgccgacccccttgtgcctagaaaaggccttcgcttgggtttcctttgtatgcttcagccttcctagttggtttttctaggcctggtgtgagaggtagggaagtctgcacataactaattcttttgcttaagggcctatggcacaagtgcacaaacttcaattcttgatgttctaagctctctcctctaacagagggagtgctgaaagcttttgagtcaagacaatggagtgctcttcctccctcactctgccttccgagcttatggttccttttctcaggagaggattttcaggattattggaggattaggtcattgtcagatgactggaaaacctaaataggatctctctccagctcaaggttgtcccagtgaggaagactttaccaacttctcactctaccccactactcacatgagtgttagctccaccttgcaaaggctgaagaccagttctccccagtgaaagctgcctcattcttttatggagttccctggagtggcagagctataaagacgagcattgggatttgcagtctccatgtagcctttcgtgcttggcaacccctgtagactttttgtcccaagcagattgcgtgcgtgcgcctgtgtgtgagaataagtgccttactttgctgtgtggttttcaacttgtactccgtggccagcccccagttgccagggctcgacggcagccaaggacaccatacctcagtatagttatatataaaagggacacggattgtgacagtttcaccccatttgtttctaaccccgctgcccaggattagggtctgtggtgtgttctgttttgtttttggtttctcccttgtgtcagttctcttctggcccagctgggtggctgtggaagtctgtgaggtggcccaaccacaagcatacctattaagagaagcccagagcttccagcccccacttcgaaaactctcctctggccccacatagcaaactccttctccgttattttccccacccccagattttttttaaaaggcccacttgccgtaacctcttttggtctattttgcttcccattcagcccaaagtttatatgataaaggtgtttacttttacttcccagtctccaagtgctaacacataaacacatacatgtctgactgttgcagaactgttcgagctcctaattcagtgttaccttgttttagtcgcagcaaccctctcccctaccccttgcccgcccacgtttttctcactcttccgggttgtgcaataactctcccagccagtggtcctttccacagcctttctgtcccttaaaacacctgcaactgggggagaaatgggacccatgggagggggagtcgtcatcccttacacaagaaatagccactttccttttgttgtcattcttgtgatcctgggtgggtttctgtggcactcttttagaacatgtagcatcatcttagaggtctatttttaaaaaatgtgttgaagaggaaaaaaccattctcacgatggggcttaagtcattgtccaggaataagattggcgtggtgcccatgacatcaccgtcactctgcctaaaagcactctagagctacttgttcacgtggagaggaaggatattttgcgaagcaacagccgcaggtggagagccctgttcacctgatagggtctagctgtgacagtaaatataataccgctgtttccttgggtacagatttgagtgttcatgtgatgagactgtaaacctcatttttcggttcctctgtttaaaaaaacatctgaaggatgaactaaggctgctggtgccctgagcaactgataatgcaaatgtggacaaagtgtctgttttctactctagcctgttcatatggaccaaatttcaacaaggaactcaaggaaaatttgtacctgccgtatttatgctttcatgtaaaaaagggttggggggaggggtgtctttttgcttttggtgaactttttttcaaaatcatttttccactgtttctgtctggttttaaaacaaattacagttttgtatggattttttaaatgtacattttggaacaaatgatcaaatattttctgaaataacaataaaaggcagaaaattatcagaaaaaaaaaa

SEQ ID NO: 229 - DNA, 3381 bp, Homo sapiens
gcggccgcagcgcgcatttgggctccgaggaagttgaccgaggcggctgccgcaggatcccgggcccggatcgcacgaagcccgcgcggccgtctcctccgcgcgccacccctgcgcctcccgcgagctccacttcccatctgctattgtttccgattgttttccggtggcgagcccggctccgaaacttacaaagtgttggatgtcccccgttcgaactgagggactgcagaccgcctctgggtagctggatgaagcccaccccgtccccttctggtaccaaagtgcttactcctctccaaagtgccgtgtctgaactgccgctgggaagaagcggctcctgagacgcgcccacacctttcacctgccgcgcgcttccccctcctcggccaccttcccggcggaagcagcgaggagggagccccctttggccgtcctccgtggaaccggttttccgaggctggcaaaagccgaggctggatttgggggaggaatattagactcggaggagtctgcgcgcttttctcctccccgcgcctcccggtcgccgcgggttcaccgctcagtccccgcgctcgctccgcaccccacccacttcctgtgctcgcccggggggcgtgtgccgtgcggctgccggagttcggggaagttgtggctgtcgagaatgggggtctgtgggtacctgttcctgccctggaagtgcctcgtggtcgtgtctctcaggctgctgttccttgtacccacaggagtgcccgtgcgcagcggagatgccaccttccccaaagctatggacaacgtgacggtccggcagggggagagcgccaccctcaggtgcactattgacaaccgggtcacccgggtggcctggctaaaccgcagcaccatcctctatgctgggaatgacaagtggtgcctggatcctcgcgtggtccttctgagcaacacccaaacgcagtacagcatcgagatccagaacgtggatgtgtatgacgagggcccttacacctgctcggtgcagacagacaaccacccaaagacctctagggtccacctcattgtgcaagtatctcccaaaattgtagagatttcttcagatatctccattaatgaagggaacaatattagcctcacctgcatagcaactggtagaccagagcctacggttacttggagacacatctctcccaaagcggttggctttgtgagtgaagacgaatacttggaaattcagggcatcaccagggagcagtcaggggactacgagtgcagtgcctccaatgacgtggccgcgcccgtggtacggagagtaaaggtcaccgtgaactatccaccatacatttcagaagccaagggtacaggtgtccccgtgggacaaaaggggacactgcagtgtgaagcctcagcagtcccctcagcagaattccagtggtacaaggatgacaaaagactgattgaaggaaagaaaggggtgaaagtggaaaacagacctttcctctcaaaactcatcttcttcaatgtctctgaacatgactatgggaactacacttgcgtggcctccaacaagctgggccacaccaatgccagcatcatgctatttggtccaggcgccgtcagcgaggtgagcaacggcacgtcgaggagggcaggctgcgtctggctgctgcctcttctggtcttgcacctgcttctcaaattttgatgtgagtgccacttccccacccgggaaaggctgccgccaccaccaccaccaacacaacagcaatggcaacaccgacagcaaccaatcagatatatacaaatgaaattagaagaaacacagcctcatgggacagaaatttgagggaggggaacaaagaatactttggggggaaaaaagttttaaaaaagaaattgaaaattgccttgcagatatttaggtacaatggagttttcttttcccaaacgggaagaacacagcacacccggcttggacccactgcaagctgcatcgtgcaacctctttggtgccagtgtgggcaagggctcagcctctctgcccacagagtgcccccacgtggaacattctggagctggccatcccaaattcaatcagtccatagagacgaacagaatgagaccttccggcccaagcgtggcgctgcgggcactttggtagactgtgccaccacggcgtgtgttgtgaaacgtgaaataaaaagagcaagaaagaaaaaggaaacaaaataagaccgtctgacagcaacaacggtcccacaaacaagtcacaaaagataccgttaaacttttttttttttttatcattttactacatgaacatcatggataacaagggattctgattcattattaatttcattaattatattttctgatatgagtctagaacttactgcaaaaacaagacaaaactaaaaaaatacaactgagaagggtgaagagaagtatgtttgttaaacagtaaaaatgaatagtatacttcttaactaggtttacaactggtggaccacacaccaggcactaatcacctggtgaggatttggcatatccaccaaaaaatgcatccgatttaaccaacatctccaccagcgctacggactcctcccaattctgacatctcttgcagacaatactatgctctctacacactgtttagaaatggaaaggtgatctgcactgtatcttgggtttgttggctatgcttcctttgatgacatatattatacagtatatatatacatatattttttttgttagagttctagccattttatttctccgcagggtcctttctcagacattactgcatgctgtatatggcgttagctgtgtgttgatcttctaaaagatgatagagtttactggtaattgtgtaatcagctcctgcctttttattttcttgggttatttacatgtcagagacatttataaaaagtgaaaggataaaaaaaaaaaaaaacaactaataccgggcgcagcatctttccaggtgtggctctgcgctaggccaccccaggtggccccgctttctccattctgccctgtggcgttaacagacagcaagcagctgaacaagcagtaccgtcagtacccacttgctttagcccattatgggaatctctgatgcctttgtgaccactggagagtttaatcctcttggtttattttatttcccacctttgtgtgagtgtgtatgaaagagaagaaaatgcaatttttaggtaatcttttttttttttcccctcccctgaaagtctgggaacctgagagtcctcggggaggggtcctggatgtgatgagggaaagggggattgggggatccgggagggtggggttgtctctgacttgacattaaaaagtgttccatgtccctcttcaaaaaaa

SEQ ID NO: 230 - DNA, 3647 bp, Homo sapiens
gttgtcatgggggaggtggtggcgcttggtggccactggcggccgaggtagaggcagtggcgcttgagttggtcgggggcagcggcagatttgaggcttaagcaacttcttccggggaagagtgccagtgcagccactgttacaattcaagatcttgatctatatccatagattggaatattggtgggccagcaatcctcagacgcctcacttaggacaaatgaggaaactgaggcttggtgaagttacgaaacttgtccaaaatcacacaacttgtaaagggcacagccaagattcagagccaggctgtaaaaattaaaatgaacaaattacggcaaagttttaggagaaagaaggatgtttatgttccagaggccagtcgtccacatcagtggcagacagatgaagaaggcgttcgcaccggaaaatgtagcttcccggttaagtaccttggccatgtagaagttgatgaatcaagaggaatgcacatctgtgaagatgctgtaaaaagattgaaagctgaaaggaagttcttcaaaggcttctttggaaaaactggaaagaaagcagttaaagcagttctgtgggtctcagcagatggactcagagttgtggatgaaaaaactaaggacctcatagttgaccagacgatagagaaagtttctttctgtgccccagacaggaactttgatagagccttttcttacatatgccgtgatggcaccactcgtcgctggatctgtcactgcttcatggctgtcaaggacacaggtgaaaggttgagccatgcagtaggctgtgcttttgcagcctgtttagagcgcaagcagaagcgggagaaggaatgtggagtgactgctacttttgatgctagtcggaccacttttacaagagaaggatcattccgtgtcacaacagccactgaacaagcagaaagagaggagatcatgaaacaaatgcaagatgccaagaaagctgaaacagataagatagtcgttggttcatcagttgcccctggcaacactgccccatccccatcctctcccacctctcctacttctgatgccacgacctctctggagatgaacaatcctcatgccatcccacgccggcatgctccaattgaacagcttgctcgccaaggctctttccgaggttttcctgctcttagccagaagatgtcaccctttaaacgccaactatccctacgcatcaatgagttgccttccactatgcagaggaagactgatttccccattaaaaatgcagtgccagaagtagaaggggaggcagagagcatcagctccctgtgctcacagatcaccaatgccttcagcacacctgaggaccccttctcatctgctccgatgaccaaaccagtgacagtggtggcaccacaatctcctaccttccaagctaatggcactgactcagccttccatgtgcttgctaagccagcccatactgctctagcacccgtagcaatgcctgtgcgtgaaaccaacccttgggcccatgcccctgatgctgctaacaaggaaattgcagccacatgttcggggaccgagtggggtcaatcttctggtgctgcctctccaggtctcttccaggccggtcatagacgtactccctctgaggccgaccgatggttagaagaggtgtctaagagcgtccgggctcagcagccccaggcctcagctgctcctctgcagccagttctccagcctcctccacccactgccatctcccagccagcatcacctttccaagggaatgcattcctcacctctcagcctgtgccagtgggtgtggtcccagccctgcaaccagcctttgtccctgcccagtcctatcctgtggccaatggaatgccctatccagcccctaatgtgcctgtggtgggcatcactccctcccagatggtggccaacgtatttggcactgcaggccaccctcaggctgcccatccccatcagtcacccagcctggtcaggcagcagacattccctcactacgaggcaagcagtgctaccaccagtcccttctttaagcctcctgctcagcacctcaacggttctgcagctttcaatggtgtagatgatggcaggttggcctcagcagacaggcatacagaggttcctacaggcacctgcccagtggatccttttgaagcccagtgggctgcattagaaaataagtccaagcagcgtactaatccctcccctaccaaccctttctccagtgacttacagaagacgtttgaaattgaactttaagcaatcattatggctatgtatcttgtccataccagacagggagcagggggtagcggtcaaaggagcaaaacagactttgtctcctgattagtactcttttcactaatcccaaaggtcccaaggaacaagtccaggcccagagtactgtgaggggtgattttgaaagacatgggaaaaagcattcctagagaaaagctgccttgcaattaggctaaagaagtcaaggaaatgttgctttctgtactccctcttcccttacccccttacaaatctctggcaacagagaggcaaagtatctgaacaagaatctatattccaagcacatttactgaaatgtaaaacacaacaggaagcaaagcaatctccctttgtttttcaggccattcacctgcctcctgtcagtagtggcctgtattagagatcaagaagagtggtttgtgctcaggctggggaacagagaggcacgctatgctgccagaattcccaggagggcatatcagcaactgcccagcagagctatattttgggggagaagttgagcttccattttgagtaacagaataaatattatatatatcaaaagccaaaatctttatttttatgcatttagaatattttaaatagttctcagatattaagaagttgtatgagttgtaagtaatcttgccaaaggtaaaggggctagttgtaagaaattgtacataagattgatttatcattgatgcctactgaaataaaaagaggaaaggctggaagctgcagacaggatccctagcttgttttctgtcagtcattcattgtaagtagcacattgcaacaacaatcatgcttatgaccaatacagtcactaggttgtagttttttttaaataaaggaaaagcagtattgtcctggttttaaacctatgatggaattctaatgtcattattttaatggaatcaatcgaaatatgctctatagagaatatatcttttatatattgctgcagtttccttatgttaatcctttaacactaaggtaacatgacataatcataccatagaagggaacacaggttaccatattggtttgtaatatgggtcttggtgggttttgttttatcctttaaattttgttcccatgagttttgtggggatggggattctggttttattagctttgtgtgtgtcctcttcccccaaacccccttttggtgagaacatccccttgacagttgcagcctcttgacctcggataacaataagagagctcatctcatttttacttttgaacgttggccttacaatcaaatgtaagttatatatatttgtactgatgaaaatttataatctgctttaacaaaaataaatgttcatggtagaagcttttaaa

SEQ ID NO: 231 - DNA, 7286 bp, Homo sapiens
aggttatgtaagggtttgctttcaccccattcaaaaggtacctcttcctcttctcttgctccctctcgccctcattcttgtgcctatgcagacatttgagtagaggcgaatcactttcacttctgctggggaaattgcaacacgcttctttaaatggcagagagaaggagaaaacttagatcttctgataccaaatcactggaccttagaaggtcagaaatctttcaagccctgcaggaccgtaaaatgcgcatgtgtccaacggaagcactggggcatgagtggggaaggaatagaaacagaaagagggtaagagaagaaaaaagggaaagtggtgaaggcagggaggaaaattgcttagtgtgaatatgcacgcattcatttagttttcaaatccttgttgagcatgataaaattcccagcatcagacctcacatgttggtttccattaggatctgcctgggggaatatctgctgaatcagtggctctgagctgaactaggaaattcaccataattaggagagtcactgtatttctctccaaaaaaaaaaaagttatacccgagagacaggatcttctgatctgaaattttcttcacttctgaaattctctggtttgtgctcatcgttggtagctatttgttcatcaagagttgtgtagctggcttcttctgaaaaaaggaatctgcgtcatatctaagtcagatttcattctggtgctctcagagcagttagcccaggaaaggggccagcttctgtgacgactgctgcagaggcaggtgcagtttgtgtgccacagatattaactttgataagcacttaatgagtgccttctctgtgcgagaatggggaggaacaaaatgcagctcctaccctcctcgggctttagttgtaccttaataacaggaattttcatctgcctggctcctttcctcaaagaacaaagaagactttgcttcattaaagtgtctgagaaggaagttgatattcactgatggactccaaagaatcattaactcctggtagagaagaaaaccccagcagtgtgcttgctcaggagaggggagatgtgatggacttctataaaaccctaagaggaggagctactgtgaaggtttctgcgtcttcaccctcactggctgtcgcttctcaatcagactccaagcagcgaagacttttggttgattttccaaaaggctcagtaagcaatgcgcagcagccagatctgtccaaagcagtttcactctcaatgggactgtatatgggagagacagaaacaaaagtgatgggaaatgacctgggattcccacagcagggccaaatcagcctttcctcgggggaaacagacttaaagcttttggaagaaagcattgcaaacctcaataggtcgaccagtgttccagagaaccccaagagttcagcatccactgctgtgtctgctgcccccacagagaaggagtttccaaaaactcactctgatgtatcttcagaacagcaacatttgaagggccagactggcaccaacggtggcaatgtgaaattgtataccacagaccaaagcacctttgacattttgcaggatttggagttttcttctgggtccccaggtaaagagacgaatgagagtccttggagatcagacctgttgatagatgaaaactgtttgctttctcctctggcgggagaagacgattcattccttttggaaggaaactcgaatgaggactgcaagcctctcattttaccggacactaaacccaaaattaaggataatggagatctggttttgtcaagccccagtaatgtaacactgccccaagtgaaaacagaaaaagaagatttcatcgaactctgcacccctggggtaattaagcaagagaaactgggcacagtttactgtcaggcaagctttcctggagcaaatataattggtaataaaatgtctgccatttctgttcatggtgtgagtacctctggaggacagatgtaccactatgacatgaatacagcatccctttctcaacagcaggatcagaagcctatttttaatgtcattccaccaattcccgttggttccgaaaattggaataggtgccaaggatctggagatgacaacttgacttctctggggactctgaacttccctggtcgaacagttttttctaatggctattcaagccccagcatgagaccagatgtaagctctcctccatccagctcctcaacagcaacaacaggaccacctcccaaactctgcctggtgtgctctgatgaagcttcaggatgtcattatggagtcttaacttgtggaagctgtaaagttttcttcaaaagagcagtggaaggacagcacaattacctatgtgctggaaggaatgattgcatcatcgataaaattcgaagaaaaaactgcccagcatgccgctatcgaaaatgtcttcaggctggaatgaacctggaagctcgaaaaacaaagaaaaaaataaaaggaattcagcaggccactacaggagtctcacaagaaacctctgaaaatcctggtaacaaaacaatagttcctgcaacgttaccacaactcacccctaccctggtgtcactgttggaggttattgaacctgaagtgttatatgcaggatatgatagctctgttccagactcaacttggaggatcatgactacgctcaacatgttaggagggcggcaagtgattgcagcagtgaaatgggcaaaggcaataccaggtttcaggaacttacacctggatgaccaaatgaccctactgcagtactcctggatgtttcttatggcatttgctctggggtggagatcatatagacaatcaagtgcaaacctgctgtgttttgctcctgatctgattattaatgagcagagaatgactctaccctgcatgtacgaccaatgtaaacacatgctgtatgtttcctctgagttacacaggcttcaggtatcttatgaagagtatctctgtatgaaaaccttactgcttctctcttcagttcctaaggacggtctgaagagccaagagctatttgatgaaattagaatgacctacatcaaagagctaggaaaagccattgtcaagagggaaggaaactccagccagaactggcagcggttttatcaactgacaaaactcttggattctatgcatgaagtggttgaaaatctccttaactattgcttccaaacatttttggataagaccatgagtattgaattccccgagatgttagctgaaatcatcaccaatcagataccaaaatattcaaatggaaatatcaaaaaacttctgtttcatcaaaagtgactgccttaataagaatggttgccttaaagaaagtcgaattaatagcttttattgtataaactatcagtttgtcctgtagaggttttgttgttttattttttattgttttcatctgttgttttgttttaaatacgcactacatgtggtttatagagggccaagacttggcaacagaagcagttgagtcgtcatcacttttcagtgatgggagagtagatggtgaaatttattagttaatatatcccagaaattagaaaccttaatatgtggacgtaatctccacagtcaaagaaggatggcacctaaaccaccagtgcccaaagtctgtgtgatgaactttctcttcatactttttttcacagttggctggatgaaattttctagactttctgttggtgtatcccccccctgtatagttaggatagcatttttgatttatgcatggaaacctgaaaaaaagtttacaagtgtatatcagaaaagggaagttgtgccttttatagctattactgtctggttttaacaatttcctttatatttagtgaactacgcttgctcattttttcttacataattttttattcaagttattgtacagctgtttaagatgggcagctagttcgtagctttcccaaataaactctaaacattaatcaatcatctgtgtgaaaatgggttggtgcttctaacctgatggcacttagctatcagaagaccacaaaaattgactcaaatctccagtattcttgtcaaaaaaaaaaaaaaaaaagctcatattttgtatatatctgcttcagtggagaattatataggttgtgcaaattaacagtcctaactggtatagagcacctagtccagtgacctgctgggtaaactgtggatgatggttgcaaaagactaatttaaaaaataactaccaagaggccctgtctgtacctaacgccctatttttgcaatggctatatggcaagaaagctggtaaactatttgtctttcaggaccttttgaagtagtttgtataacttcttaaaagttgtgattccagataaccagctgtaacacagctgagagacttttaatcagacaaagtaattcctctcactaaactttacccaaaaactaaatctctaatatggcaaaaatggctagacacccattttcacattcccatctgtcaccaattggttaatctttcctgatggtacaggaaagctcagctactgatttttgtgatttagaactgtatgtcagacatccatgtttgtaaaactacacatccctaatgtgtgccatagagtttaacacaagtcctgtgaatttcttcactgttgaaaattattttaaacaaaatagaagctgtagtagccctttctgtgtgcaccttaccaactttctgtaaactcaaaacttaacatatttactaagccacaagaaatttgatttctattcaaggtggccaaattatttgtgtaatagaaaactgaaaatctaatattaaaaatatggaacttctaatatatttttatatttagttatagtttcagatatatatcatattggtattcactaatctgggaagggaagggctactgcagctttacatgcaatttattaaaatgattgtaaaatagcttgtatagtgtaaaataagaatgatttttagatgagattgttttatcatgacatgttatatattttttgtaggggtcaaagaaatgctgatggataacctatatgatttatagtttgtacatgcattcatacaggcagcgatggtctcagaaaccaaacagtttgctctaggggaagagggagatggagactggtcctgtgtgcagtgaaggttgctgaggctctgacccagtgagattacagaggaagttatcctctgcctcccattctgaccacccttctcattccaacagtgagtctgtcagcgcaggtttagtttactcaatctccccttgcactaaagtatgtaaagtatgtaaacaggagacaggaaggtggtgcttacatccttaaaggcaccatctaatagcgggttactttcacatacagccctcccccagcagttgaatgacaacagaagcttcagaagtttggcaatagtttgcatagaggtaccagcaatatgtaaatagtgcagaatctcataggttgccaataatacactaattcctttctatcctacaacaagagtttatttccaaataaaatgaggacatgtttttgttttctttgaatgctttttgaatgttatttgttattttcagtattttggagaaattatttaataaaaaaacaatcatttgctttttgaatgctctctaaaagggaatgtaatattttaagatggtgtgtaacccggctggataaatttttggtgcctaagaaaactgcttgaatattcttatcaatgacagtgttaagtttcaaaaagagcttctaaaacgtagattatcattcctttatagaatgttatgtggttaaaaccagaaagcacatctcacacattaatctgattttcatcccaacaatcttggcgctcaaaaaatagaactcaatgagaaaaagaagattatgtgcacttcgttgtcaataataagtcaactgatgctcatcgacaactataggaggcttttcattaaatgggaaaagaagctgtgcccttttaggatacgtgggggaaaagaaagtcatcttaattatgtttaattgtggatttaagtgctatatggtggtgctgtttgaaagcagatttatttcctatgtatgtgttatctggccatcccaacccaaactgttgaagtttgtagtaacttcagtgagagttggttactcacaacaaatcctgaaaagtatttttagtgtttgtaggtattctgtgggatactatacaagcagaactgaggcacttaggacataacacttttggggtatatatatccaaatgcctaaaactatgggaggaaaccttggccaccccaaaaggaaaactaacatgatttgtgtctatgaagtgctggataattagcatgggatgagctctgggcatgccatgaaggaaagccacgctcccttcagaattcagaggcagggagcaattccagtttcacctaagtctcataattttagttcccttttaaaaaccctgaaaactacatcaccatggaatgaaaaatattgttatacaatacattgatctgtcaaacttccagaaccatggtagccttcagtgagatttccatcttggctggtcactccctgactgtagctgtaggtgaatgtgtttttgtgtgtgtgtgtctggttttagtgtcagaagggaaataaaagtgtaaggaggacactttaaaccctttgggtggagtttcgtaatttcccagactattttcaagcaacctggtccacccaggattagtgaccaggttttcaggaaaggatttgcttctctctagaaaatgtctgaaaggattttattttctgatgaaaggctgtatgaaaataccctcctcaaataacttgcttaactacatatagattcaagtgtgtcaatattctattttgtatattaaatgctatataatggggacaaatctatattatactgtgtatggcattattaagaagctttttcattattttttatcacagtaattttaaaatgtgtaaaaattaaaaccagtgactcctgtttaaaaataaaagttgtagttttttattcatgctgaataataatctgtagttaaaaaaaaagtgtctttttacctacgcagtgaaatgtcagactgtaaaaccttgtgtggaaatgtttaacttttattttttcatttaaatttgctgttctggtattaccaaaccacacatttgtaccgaattggcagtaaatgttagccatttacagcaatgccaaatatggagaaacatcataataaaaaaatctgctttttcatta

SEQ ID NO: 232 - DNA, 6072 bp, Homo sapiens
cagccgcgtcccccagccccggcctcccgcggacccatgcccgcccgtatcggctactacgagatcgaccgcaccatcggcaagggcaacttcgcggtggtcaagcgggccacgcacctcgtcaccaaggccaaggttgctatcaagatcatagataagacccagctggatgaagaaaacttgaagaagattttccgggaagttcaaattatgaagatgctttgccacccccatatcatcaggctctaccaggttatggagacagaacggatgatttatctggtgacagaatatgctagtggaggggaaatatttgaccacctggtggcccatggtagaatggcagaaaaggaggcacgtcggaagttcaaacagatcgtcacagctgtctatttttgtcactgtcggaacattgttcatcgtgatttaaaagctgaaaatttacttctggatgccaatctgaatatcaaaatagcagattttggtttcagtaacctcttcactcctgggcagctgctgaagacctggtgtggcagccctccctatgctgcacctgaactctttgaaggaaaagaatatgatgggcccaaagtggacatctggagccttggagttgtcctctacgtgcttgtgtgcggtgccctgccatttgatggaagcacactgcagaatctgcgggcccgcgtgctgagtggaaagttccgcatcccattttttatgtccacagaatgtgagcatttgatccgccatatgttggtgttagatcccaataagcgcctctccatggagcagatctgcaagcacaagtggatgaagctaggggacgccgatcccaactttgacaggttaatagctgaatgccaacaactaaaggaagaaagacaggtggaccccctgaatgaggatgtcctcttggccatggaggacatgggactggacaaagaacagacactgcagtcattaagatcagatgcctatgatcactatagtgcaatctacagcctgctgtgtgatcgacataagagacataaaaccctgcgtctcggagcacttcctagcatgccccgagccctggcctttcaagcaccagtcaatatccaggcggagcaggcaggtactgctatgaacatcagcgttccccaggtgcagctgatcaacccagagaaccaaattgtggagccggatgggacactgaatttggacagtgatgagggtgaagagccttcccctgaagcattggtgcgctatttgtcaatgaggaggcacacagtgggtgtggctgacccacgcacggaagttatggaagatctgcagaagctcctacctggctttcctggagtcaacccccaggctccattcctgcaggtggcccctaatgtgaacttcatgcacaacctgttgcctatgcaaaacttgcaaccaaccgggcaacttgagtacaaggagcagtctctcctacagccgcccacgctacagctgttgaatggaatgggcccccttggccggagggcatcagatggaggagccaacatccaactgcatgcccagcagctgctgaagcgcccacggggaccctctccgcttgtcaccatgacaccagcagtgccagcagttacccctgtggacgaggagagctcagacggggagccagaccaggaagctgtgcagagctctacctacaaggactccaacactctgcacctccctacggagcgtttctcccctgtgcgccggttctcagatggggctgcgagcatccaggccttcaaagctcacctggaaaaaatgggcaacaacagcagcatcaaacagctgcagcaggagtgtgagcagctgcagaagatgtacggggggcagattgatgaaagaaccctggagaagacccagcagcagcatatgttataccagcaggagcagcaccatcaaattctccagcaacaaattcaagactctatctgtcctcctcagccatctccacctcttcaggctgcatgtgaaaatcagccagccctccttacccatcagctccagaggttaaggattcagccttcaagcccaccccccaaccaccccaacaaccatctcttcaggcagcccagtaatagtcctccccccatgagcagtgccatgatccagcctcacggggctgcatcttcttcccagtttcaaggcttaccttcccgcagtgcaatctttcagcagcaacctgagaactgttcctctcctcccaacgtggcactaacctgcttgggtatgcagcagcctgctcagtcacagcaggtcaccatccaagtccaagagcctgttgacatgctcagcaacatgccaggcacagctgcaggctccagtgggcgcggcatctccatcagccccagtgctggtcagatgcagatgcagcaccgtaccaacctgatggccaccctcagctatgggcaccgtcccttgtccaagcagctgagtgctgacagtgcagaggctcacagcttgaacgtgaatcggttctcccctgctaactacgaccaggcgcatttacacccccatctgttttcggaccagtcccggggttcccccagcagctacagcccttcaacaggagtggggttctctccaacccaagccctgaaagtccctccacttgaccaattccccaccttccctcccagtgcacatcagcagccgccacactataccacgtcggcactacagcaggccctgctgtctcccacgccgccagactatacaagacaccagcaggtaccccacatccttcaaggactgctttctccccggcattcgctcaccggccactcggacatccggctgcccccaacagagtttgcacagctcattaaaaggcagcagcaacaacggcagcagcagcagcaacagcagcaacagcaagaataccaggaactgttcaggcacatgaaccaaggggatgcggggagtctggctcccagccttgggggacagagcatgacagagcgccaggctttatcttatcaaaatgctgactcttatcaccatcacaccagcccccagcatctgctacaaatcagggcacaagaatgtgtctcacaggcttcctcacccaccccgccccacgggtatgctcaccagccggcactgatgcattcagagagcatggaggaggactgctcgtgtgagggggccaaggatggcttccaagacagtaagagttcaagtacattgaccaaaggttgccatgacagccctctgctcttgagtaccggtggacctggggaccctgaatctttgctaggaactgtgagtcatgcccaagaattggggatacatccctatggtcatcagccaactgctgcattcagtaaaaataaggtgcccagcagagagcctgtcatagggaactgcatggatagaagttctccaggacaagcagtggagctgccggatcacaatgggctcgggtacccagcacgcccctccgtccatgagcaccacaggccccgggccctccagagacaccacacgatccagaacagcgacgatgcttatgtacagctggataacttgccaggaatgagtctcgtggctgggaaagcacttagctctgcccggatgtcggatgcagttctcagtcagtcttcgctcatgggcagccagcagtttcaggatggggaaaatgaggaatgtggggcaagcctgggaggtcatgagcacccagacctgagtgatggcagccagcatttaaactcctcttgctatccatctacgtgtattacagacattctgctcagctacaagcaccccgaagtctccttcagcatggagcaggcaggcgtgtaacaagaaacagagagttttgtgtacagcttgggaatgaaaaggttgattgtaaacccacagtatctagcagcgttgtgccaaattgcccttgtgtttctctccacccaaaatatcacagctgctttcctcacatttggttcatccgtgtgctgttcttttgggttctgagagggttttgccatgtttgcttgtatgaccaagtcaccaaggaaataaacaggaaggaaatccatgttctccatcttttgtgaaagtatatttgagttggtggttttttgttttgtttgggggtttgtgttttgttttgtttttggtatgttttcttccagaggtgatatactttcttttttttcttcctttcttttttttctttcgttccttttttgaaacaggagagcaaagcagttagagttcagaggccagcggcctcagggccactccctccctagccttcatcagcagagcaccctccatccccctgcattgctcttctgtgaaagcaaatactaaaggatgccatcctctggaatcctaatggcaggcaaagggagagaggaagggtgacggcttctggcacttagaaaacaaaaagaacaaaaaaagagaaacccccaagcctggaacgcagagaggtctttactgctgggatccacggaaaacatgtctgtcctagccaagatcatatgaagagtttggcacggaggctgagaatgacctggcatagatggtttgccagttaggatgtctcaatttgagcctttgcttttggtggataactcagctcccctcttgtaacctggaaagttggttgcctttatcatcctgctggttttatccatggactgaacacccaacagcagtgcactatgctttctatggcatctttcattctcattttatattgtgctataaaaaggattgtttctccatatatatattatatatgtgtgtatatatataatataatatatgtgtatatatatattatatatataatatataatataatatattatatatatattatatatataatatatatataaaatatatatatatatgctctcctctttcagcctctttgtcacagggaagaagtgtaggaggttgccttgggccctgcctctctcctaacctcctcttccccactgggtaccctcagcccctatattttaattcttgatcatgtagaaattgtttttggtaaatgttgatattattgttattatcattattaataaataaagagaaaaggaatttttgtttaaatgagaaatgtttaaccagattctgttctatttgaattgtgacttgcaccttttgttcaaagtatttcctttaggcattgtaattgtgaacagctcttacttgtgccagtgacagatgcagtggtctcctttccccagttgaagcagtgcatacgcagtagctattatttgtgttatctttatttctcttcattgttagaaaccaaagtcttctctgctggctggggctgagagagggtctgggttatctccttctgatcttcaaaacaagagagagaccttgaatacactgactcttccaccctttttttttctgggaaaggagagcaagaggtcccgagtcccctcctagtctttcatcctgaatttgcacagaggaaagcgggtgcccggcatggccatcctgatgttgctggcgggatccccatgcaccttgtccttctccactgatactggcagctcggctcctggacccaagatcccttgagtggaattctgcagtgcaagagcccttcgtgggagctgtcccatgtttccatggtccccagtctcccctccacttggtggggtcaccaactactcaccagaagggggcttaccaagaaagccctaaaaagctgttgacttatctgcgcttgttccaactcttatgcccccaacctgccctaccaccaccacgcgctcagcctgatgtgtttacatggtactgtatgtatgggagagcagactgcaccctccagcaacaacagatgaaagccagtgagcctactaaccgtgccatcttgcaaactacactttaaaaaaaactcattgctttgtattgtagtaaccaatatgtgcagtatacgttgaatgtatatgaacatactttcctatttctgttctttgaaaatgtcagaaatatttttttctttctcattttatgttgaactaaaaaggattaaaaaaaaaatctccagactcaagttgctaaaaa

SEQ ID NO: 233 - DNA, 3320 bp, Homo sapiens
gtgggtgagcggcggccacggcatcctgtgctgtgggggctacgaggaaagatctaattatcatggacctgcgacagtttcttatgtgcctgtccctgtgcacagcctttgccttgagcaaacccacagaaaagaaggaccgtgtacatcatgagcctcagctcagtgacaaggttcacaatgatgctcagagttttgattatgaccatgatgccttcttgggtgctgaagaagcaaagacctttgatcagctgacaccagaagagagcaaggaaaggcttggaaagattgtaagtaaaatagatggcgacaaggacgggtttgtcactgtggatgagctcaaagactggattaaatttgcacaaaagcgctggatttacgaggatgtagagcgacagtggaaggggcatgacctcaatgaggacggcctcgtttcctgggaggagtataaaaatgccacctacggctacgttttagatgatccagatcctgatgatggatttaactataaacagatgatggttagagatgagcggaggtttaaaatggcagacaaggatggagacctcattgccaccaaggaggagttcacagctttcctgcaccctgaggagtatgactacatgaaagatatagtagtacaggaaacaatggaagatatagataagaatgctgatggtttcattgatctagaagagtatattggtgacatgtacagccatgatgggaatactgatgagccagaatgggtaaagacagagcgagagcagtttgttgagtttcgggataagaaccgtgatgggaagatggacaaggaagagaccaaagactggatccttccctcagactatgatcatgcagaggcagaagccaggcacctggtctatgaatcagaccaaaacaaggatggcaagcttaccaaggaggagatcgttgacaagtatgacttatttgttggcagccaggccacagattttggggaggccttagtacggcatgatgagttctgagctgcggaggaaccctcatttcctcaaaagtaatttatttttacagcttctggtttcacatgaaattgtttgcgctactgagactgttactacaaactttttaagacatgaaaaggcgtaatgaaaaccatcccgtccccattcctcctcctctctgagggactggagggaagccgtgcttctgaggaacaactctaattagtacacttgtgtttgtagatttacactttgtattatgtattaacatggcgtgtttatttttgtatttttctctggttgggagtatgatatgaaggatcaagatcctccactcacacatgtagacaaacattagctctttactctttctcaaccccttatatgattttaataattctcacttcactaattttgtaagcctgagatcaataagaaatgttcaggagagaggaaagaaaaaatatatatgctccacaatttatatttagagagagaacacttagtcttgcctgtcaaaaagtccaacatttcataggtagtaggggccacatattacattcagttgctataggtccagcaactgaacctgccattacctgggcaaggaaagatccctttgctctaggaaagcttggcccaaattgattttcttctttttccccctgtaggactgactgttggctaattttgtcaagcacagctgtggtgggaagagttagggccagtgtcttgaaaatcaatcaagtagtgaatgtgatctctttgcagagctatagatagaaacagctggaaaactaaaggaaaaatacaaatgttttcggggcatacattttttttctgggtgtgcatctgttgaaatgctcaagacttaattatttgccttttgaaatcactgtaaatgcccccatccggttcctcttcttcccaggtgtgccaaggaattaatcttggtttcactacaattaaaattcactcctttccaatcatgtcattgaaagtgcctttaacgaaagaaatggtcactgaatgggaattctcttaagaaaccctgagattaaaaaaagactatttggataacttataggaaagcctagaacctcccagtagagtggggatttttttcttcttccctttctcttttggacaatagttaaattagcagtattagttatgagtttggttgcagtgttcttatcttgtgggctgatttccaaaaaccacatgctgctgaatttaccagggatcctcatacctcacaatgcaaaccacttactaccaggcctttttctgtgtccactggagagcttgagctcacactcaaagatcagaggacctacagagagggctctttggtttgaggaccatggcttacctttcctgcctttgacccatcacaccccatttcctcctctttccctctccccgctgccaaaaaaaaaaaaaaggaaacgtttatcatgaatcaacagggtttcagtccttatcaaagagagatgtggaaagagctaaagaaaccaccctttgttcccaactccactttacccatattttatgcaacacaaacactgtccttttgggtccctttcttacagatggacctcttgagaagaattatcgtattccacgtttttagccctcaggttaccaagataaatatatgtatatataacctttattattgctatatctttgtggataatacattcaggtggtgctgggtgatttattataatctgaacctaggtatatcctttggtcttccacagtcatgttgaggtgggctccctggtatggtaaaaagccaggtataatgtaacttcaccccagcctttgtactaagctcttgatagtggatatactcttttaagtttagccccaatatagggtaatggaaatttcctgccctctgggttccccatttttactattaagaagaccagtgataatttaataatgccaccaactctggcttagttaagtgagagtgtgaactgtgtggcaagagagcctcacacctcactaggtgcagagagcccaggccttatgttaaaatcatgcacttgaaaagcaaaccttaatctgcaaagacagcagcaagcattatacggtcatcttgaatgatccctttgaaattttttttttgtttgtttgtttaaatcaagcctgaggctggtgaacagtagctacacacccatattgtgtgttctgtgaatgctagctctcttgaatttggatattggttattttttatagagtgtaaaccaagttttatattctgcaatgcgaacaggtacctatctgtttctaaataaaactgtttacattcaaaaa

SEQ ID NO: 234 - DNA, 10434 bp, Homo sapiens
atggcgaaccggcgagtggggcgaggctgctgggaagtgagcccgaccgagcggaggccgcccgcggggctgcggggccccgcggccgaggaggaggcgtcttccccgccggtcctgtctctcagccacttctgcaggtctcctttcctttgcttcggggacgttctcctgggagcctcacggacgctgtctctggccctagacaaccctaacgaggaggtggcagaagtgaagatctcccacttcccggccgcggacctgggcttcagtgtgtcgcagcgctgtttcgtgttgcagcctaaagagaaaattgttatttctgttaactggacaccactcaaagaaggccgagtaagagagattatgacatttcttgtaaatgatgttctgaaacaccaagctatattactaggaaatgcagaagagcagaaaaagaaaaagaggagtctttgggataccattaaaaagaagaaaatttcagcctctacaagtcacaacagaagggtttcaaatattcagaatgttaataaaacatttagtgtttcccaaaaagttgacagagttaggagcccactacaagcttgtgaaaacttggctatgaatgaaggcggtcccccaacagaaaacaattctttaatacttgaagaaaataaaatacccatatcacctattagccctgctttcaatgaatgccatggtgcaacttgcttgccactctctgtacgtcgatctactacctactcatctcttcatgcatcagaaaatagggaactattaaatgtacacagtgccaacgtttcaaaagtttcttttaatgagaaagctgtaactgaaacttcctttaattctgtaaatgttaatggccaaagaggagagaatagtaaacttagtcttacccccaactgttcttcaactttgaacattacacaaagccaaatacattttctaagtccagattcttttgtaaataatagtcatggagctaataatgaactagaattagtaacatgtctttcatcagatatgtttatgaaagataattcacagcctgtgcatttggaatcaacaattgcacatgaaatttatcagaaaattttaagtccagattctttcataaaagataattatggactaaatcaggatctagaatcagagtcagttaatcctattttatcccctaatcaatttttaaaagataacatggcatatatgtgtacatctcagcaaacatgtaaagtaccattatcaaatgaaaattctcaagtcccacagtctcctgaagattggagaaaaagtgaagtttcgccacgtattcctgaatgtcagggttcaaaatctcccaaagctatttttgaagaactagtagaaatgaagtcaaattactacagttttataaaacaaaataatcctaaattttctgcagttcaggatatttctagtcatagccacaataaacaacctaagagacgtccaatactttctgccactgttactaaaaggaaggccacctgtaccagagaaaaccaaactgagattaataaaccaaaagcaaaaagatgtctcaacagtgcagtgggtgaacatgaaaaagtaataaataatcaaaaggaaaaagaagattttcattcttatcttccaattatagatccaatattaagtaaatctaagagttataaaaacgaggtaacaccctcttcgacaacagcttcagttgctcggaaaagaaagagcgatggaagcatggaagatgcaaatgtgagagttgcaattacagaacatacagaagtgcgagaaatcaaaagaatccatttttctccctcagagcctaaaacatcagctgttaagaaaacaaaaaatgtgacaacacccatctcaaaacgtattagcaacagagagaaattaaacctgaagaagaaaactgatttatcaatattcagaactccaatttctaaaacaaacaaaaggacaaaacccattatcgctgtggcacagtccagtttgaccttcataaaaccattaaaaacagatattcccagacacccgatgccatttgctgcaaaaaacatgttttatgatgaacgctggaaggaaaagcaggaacagggcttcacttggtggttaaattttatattaacccctgatgacttcactgtaaaaacaaatatttctgaagtaaatgctgctactcttcttttgggaatagagaatcaacataaaataagtgttcctagagcacctacaaaagaggaaatgtctctcagagcttatactgctcggtgtaggttaaacagactacgtcgtgcagcatgccgtttgtttacttctgaaaaaatggttaaagctattaaaaagcttgaaattgaaattgaagctaggcggttaattgttcgaaaagatagacacctatggaaagatgtgggagaacgtcagaaagtcctgaattggctgttgtcctacaatcctttgtggcttcgaattggtctagagacaacttatggagaactcatatctttggaagataacagtgatgtcacagggttggctatgtttattctgaatcgcctactttggaatcctgatatagcagctgagtatagacaccccactgttcctcacctgtatagagatggtcatgaagaagctttgtccaagtttacattgaaaaagttattgttgttggtctgttttcttgattatgctaaaatttccagactcattgatcatgatccttgtctcttctgtaaagatgccgaattcaaggctagtaaagaaatccttttggctttttcacgagatttcctaagtggtgaaggtgacctttcccgtcaccttggcttattgggattacctgttaaccatgttcagacaccatttgatgaatttgattttgccgttacaaatcttgccgtagacttgcaatgtggagtgcgccttgtgcgaaccatggaacttctcacacagaactgggacctctcaaagaaactcaggattccggcaataagtcgtcttcaaaagatgcacaatgttgacattgttcttcaagttcttaaatcacgaggaattgaattaagtgatgagcatggaaatacaattctatctaaggatattgtggataggcacagagaaaaaactctcaggttgctttggaaaatagcgtttgcttttcaggtggatatttcccttaacttagatcaattaaaggaagaaattgcctttctaaaacacacaaagagtataaagaaaacaatatctctactatcatgccattctgatgatcttattaataagaaaaaaggcaaaagggatagtggttcctttgaacaatatagtgaaaacataaagttattgatggattgggtaaatgctgtttgtgccttctataataaaaaggtggagaattttacagtgtctttctcagacggccgtgtgttatgttacctgatccaccattaccatccttgctatgtgccatttgacgctatatgtcagcgtactactcaaactgtggaatgtacgcaaactggttcagtggtattaaattcatcatctgaatctgatgacagttctctggatatgtcacttaaagcatttgatcatgaaaatacttcagagctatacaaagagctcctagaaaatgaaaagaaaaattttcacttggttaggtctgcagttagagaccttggtggaatacctgctatgattaatcattcagatatgtcaaatacaattccagatgaaaaggtggttattacctatttgtcatttctttgtgcaaggcttttggatcttcgtaaagaaataagagctgctcgactcatacaaacaacatggagaaaatataaactaaaaacagatctcaaacgccatcaggagagagagaaagctgcaagaattattcaattggctgtaatcaattttctagcaaaacaaagattgagaaaaagagttaatgcagcactcgtcattcagaaatattggcgaagagtcttagcacagagaaaattattaatgttaaaaaaggaaaagctggaaaaagttcaaaataaagcagcatcacttattcagggatattggagaagatattccactagacaaagatttctgaaattgaaatattattcaatcatcctgcaatctaggataagaatgataattgctgttacatcttataaacgatatctttgggctacagttacaattcagaggcattggcgtgcttatttaagaagaaaacaagatcaacaaagatatgaaatgctaaaatcatcaactcttataatccaatctatgttcagaaaatggaagcaacgtaaaatgcaatcacaagtaaaagctacagtaatattgcaaagagcttttagagaatggcatttaagaaaacaagctaaagaagaaaattctgctattatcatacaatcatggtatagaatgcataaagaattacggaagtatatttatattagatcttgtgttgttatcattcagaaaagatttcggtgctttcaagcccaaaagttatataaaagaagaaaagagtccatactaaccatccagaagtactacaaagcatatctgaaaggaaagattgagcgcaccaactatttgcagaaacgagctgcagccattcaattacaagctgcttttaggagactgaaagctcataatttatgtagacaaattagagctgcttgtgttattcagtcatactggagaatgagacaagacagagttcgatttttaaaccttaagaagactattatcaaatttcaggcacatgtaagaaaacatcaacaacgacagaaatataagaagatgaagaaagcagctgttataattcagactcatttccgagcttatatttttgccatgaaagttctagcatcttaccagaaaacacgctctgctgtcattgtgctgcagtctgcatatagagggatgcaagccaggaaaatgtatattcacatcctcacatctgttataaagattcaatcatattatcgtgcttatgtttctaaaaaggaatttttgagcctaaaaaatgctacaataaaattgcagtcaactgttaagatgaaacaaacacgtaaacaatatttgcatttaagagcagctgcactatttatccagcaatgttaccgttccaaaaaaatagctgcacaaaagagagaagagtatatgcagatgcgggaatcttgtatcaaactgcaagcatttgttagaggataccttgtccgaaagcagatgaggttacaaagaaaagctgttatttcactacagtcttatttcagaatgagaaaggctcggcagtattatctgaaaatgtataaagcaattattgtcattcagaattactatcatgcatacaaagcacaggtcaatcagaggaagaacttcttgcaagtcaaaaaagcagctacttgcttgcaagcagcttacagaggttataaagtacgccagctaatcaaacaacaatctatagctgctcttaaaattcagtctgcttttagaggctataataaaagggtaaaatatcaatctgtgcttcaatctataataaagattcagagatggtacagggcgtacaagactcttcatgatacaagaacacattttttgaagacaaaggcagctgtgatttccctccagtctgcttatcgtggctggaaggttcggaaacagattagaagggaacatcaagctgccttgaagattcagtctgcttttagaatggccaaggcccagaaacagtttagattgtttaaaacagcagcattagtcatccagcaaaatttcagagcatggactgcaggaaggaagcaatgtatggagtatattgaactccgtcatgcggtactggtgcttcaatctatgtggaagggaaaaacactgagaagacagcttcaaaggcaacataaatgtgctatcatcatacagtcatactatagaatgcatgtgcaacaaaagaagtggaaaatcatgaaaaaagctgctcttctgattcaaaagtattatagggcttacagtattggaagagaacagaatcatttatatttgaaaacaaaagcagctgtagtaactttacagtcagcttatcgtggtatgaaagtgagaaaaagaataaaggattgcaacaaagcagcagtcactatacagtctaaatacagagcttacaaaaccaaaaagaaatatgcaacctatagagcttcagctattataattcagagatggtatcgaggtattaaaattacaaaccatcagcataaggagtatcttaatttgaagaagacagcaattaaaatccaatctgtttatagaggtattagagttagaagacatattcaacacatgcacagggcagccacttttattaaagccatgtttaaaatgcatcagtcaagaataagttaccatacaatgagaaaagcagctattgttattcaagtaagatgtagagcatattatcaaggtaaaatgcagcgtgaaaagtacctgacaattttgaaagctgttaaagtccttcaggcaagttttagaggagtaagagttagacggactcttagaaagatgcagactgcagcaacactcattcagtcaaactacagaagatacagacagcaaacatactttaataagttaaagaaaataacaaaaacagtacagcaaagatactgggcaatgaaagaaagaaacatacaatttcaaaggtataacaaactgaggcattctgtaatatacattcaggctatttttaggggaaagaaagctagaagacatttaaaaatgatgcatatagccgcaactctcattcagaggagatttagaactctaatgatgagaagaagattcctctctctcaagaaaactgctattttgattcagagaaaatatcgggcacatctttgtacaaagcatcacttacagttccttcaggtacaaaatgcagttattaaaatccagtcatcatacagaagatggatgataaggaaaaggatgcgagagatgcacagggctgctactttcatccagtctactttcagaatgcacagattacatatgagatatcgagctttgaaacaggcctccgttgtgatccaacagcaataccaagcaaatagagctgcaaaactgcagaggcagcattatctcagacaaagacactctgctgtgatccttcaggctgcattcaggggtatgaaaactagaagacatttgaagagtatgcattcctctgcaacccttattcagagtaggtttagatcattactggtgaggagaagattcatttccctcaaaaaagctactatttttgttcagaggaaatatcgagccaccatttgtgccaaacataaattgtaccaattcttgcacttaagaaaggcagccattacaatacagtcatcttacagaagactgatggtaaagaagaagttacaagaaatgcaaagggctgcagttctcattcaggctactttcaggatgcacagaacatatattacatttcagacttggaaacatgcttcaattctaattcagcaacattatcgaacatatagagctgcaaaattgcaaagagaaaattatatcagacaatggcattctgctgtggttattcaggctgcatataaaggaatgaaagcaagacaacttttaagggaaaaacacaaagcttctatcgtaatacaaagcacctacagaatgtataggcagtattgtttctaccaaaagcttcagtgggctacaaaaatcatacaagaaaaatatagagcaaataaaaagaaacagaaagtatttcaacacaatgaacttaagaaagagacttgtgttcaggcaggttttcaggacatgaacataaaaaaacagattcaggaacagcaccaggctgccattattattcagaagcattgtaaagcctttaaaataaggaagcattatctccaccttagagcaacagtagtttctattcaaagaagatacagaaaactaactgcagtgcgtacccaagcagttatttgtatacagtcttattacagaggctttaaagtacgaaaggatattcaaaatatgcaccgggctgccacactaattcagtcattctatcgaatgcacagggccaaagttgattatgaaacaaagaaaactgcaattgtggttatacagaattattataggttgtatgttagagtaaaaacagaaagaaaaaactttttagcagttcagaaatctgtacgaactattcaggctgcttttagaggcatgaaagttagacaaaaattgaaaaatgtatcagaggaaaagatggcagccattgttaaccaatctgcactctgctgttacagaagtaaaactcagtatgaagctgttcaaagtgaaggtgttatgattcaagagtggtataaagcttctggccttgcttgttcacaggaagcagagtatcattctcaaagtagggctgcagtaacaattcaaaaagctttttgtagaatggtcacaagaaaactggaaacacagaaatgtgctgccctacggattcagttcttccttcagatggctgtgtatcggagaagatttgttcagcagaaaagagctgctatcactttacagcattattttaggacgtggcaaaccagaaaacagtttttactatatagaaaagcagcagtggttttacaaaatcactacagagcatttctgtctgcaaaacatcaaagacaagtctatttacagatcagaagcagtgttatcattattcaagctagaagtaaaggatttatacagaaacggaagtttcaggaaattaaaaatagcaccataaaaattcaggctatgtggaggagatatagagccaagaaatatttatgtaaagtgaaagctgcctgcaagattcaagcctggtatagatgttggagagcacacaaagaatatctagctatattaaaagctgttaaaattattcaaggttgcttctataccaaactagagagaacacggtttttgaatgtgagagcatcagcaattatcattcagagaaaatggagagctatacttcctgcaaagatagctcatgaacacttcttaatgataaaaagacatcgagctgcttgtttgatccaagcacattatagaggatataaaggaaggcaggtctttcttcggcagaaatctgctgctttgatcatacaaaaatatatacgagccagggaggctggaaagcatgaaaggataaaatatattgaatttaaaaaatctacagttatcctacaagcactggtgcgtggttggctagtacgaaaaagatttttagaacagagagccaaaattcgacttcttcacttcactgcagctgcatattatcacctgaatgctgttagaattcaaagagcctataaactttacctggctgtgaagaatgctaacaagcaggttaattcagtcatctgtattcagagatggtttcgagcaagattacaagaaaagagatttattcagaaatatcatagcatcaaaaagattgagcatgaaggtcaagaatgtctgagccagcgaaatagggctgcatcagtaatacagaaagcagtgcgccattttctcctccgtaaaaagcaggaaaaattcactagtggaatcattaaaattcaggcattatggagaggctattcttggaggaagaaaaatgattgtacaaaaattaaagctatacgactaagtcttcaagttgttaatagggagattcgagaagaaaacaaactctacaaaagaactgcacttgcacttcattaccttttgacatataagcacctttctgccattcttgaggccttaaaacacctagaggtagttactagattgtctccactttgttgtgagaacatggcccagagtggagcaatttctaaaatatttgttttgatccgaagttgtaatcgcagtattccttgtatggaagtcatcagatatgctgtgcaagtcttgcttaatgtatctaagtatgagaaaactacttcagcagtttatgatgtagaaaattgtatagatatactattggagcttttgcagatataccgagaaaagcctggtaataaagttgcagacaaaggcggaagcatttttacaaaaacttgttgtttgttggctattttactgaagacaacaaatagagcctctgatgtacgaagtaggtccaaagttgttgaccgtatttacagtctctacaaacttacagctcataaacataaaatgaatactgaaagaatactttacaagcaaaagaagaattcttctataagcattccttttatcccagaaacacctgtaaggaccagaatagtttcaagacttaagccagattgggttttgagaagagataacatggaagaaatcacaaatcccctgcaagctattcaaatggtgatggatacgcttggcattccttattag

SEQ ID NO: 235 - DNA, 5229 bp, Homo sapiens; identical to SEQ ID NO: 176

SEQ ID NO: 236 - DNA, 4371 bp, Homo sapiens
gggtggattaattttttttttttgacgttcttagaacagtgcctgacttaattctacttcatagggttgatgtaattttgagacttaaataagttgatactaaaataccacttagtgtcccgaacactgtttgacattttagtatcaaccaagtctcaaggttacttcaatcctgtgaactagagccaaggcacctccagtggcctttcagaagttccatttccactcccgcctcatctcctaattctatctccccgttctctttactcgagccctcctggccttgcccttccttaggcctgatacgcacctatctgaagacctttgcactgcactccagcctggaaggcagagagagactccgtttcaaaaaagaaaagaattctgggtttgaatcctgcctctccgtctgctagggatatgatttagggcaagttgcttgagctctttgggcctctgttttcacgtctgtatgatagaggtggtattgtttgacttgtatttgtgaagtttcaatgagattgataattgtcgattttatgttaatccctagtacatggcctgctgtcaacacccaggacacccaggatatggtctttgctgtttgattttcctcatccccagtctcaaggggaagccaggacaatgagaacagccacttcccatcaggagtcactgcaaggcccccagggtgggatggtggggagataagaaccgtgagagaagttggcacaaaggagttatgggacaaagggtccaagataggcagaaaagaaaatgttgccagttgatggggaagaaaggaagtcggagggctcagacactgagggggacagaacatctccatgtgcagtctcatctcttatagtcagcaacaggtatccacggggagggccctacatcatctgctaccctgaaggatctggaggtaggaggctctgggcggaggtgcagtgaccccgcaggccagccctccaacctcctcccgcagcggggactgggtgcccctctgccagctgagacagcccacacacaacccagccctaatgatcgttctctctacctctcccccaagtcctcctccgcctcctcctctctgcatgcgcctcagagcccgtgccaagaacaagcagcagtcctgaactcgaggtccataaaaatcagtcgactgaatgacaccatcaaatctttgaaacaacagaagaaacaagtggaacatcagctggaagaagaaaagaaagcaaacaatgagaaacagaaagctgaaagggagctagagggtcaaatccagagattgaacacagagaaaaagaaactaaatacggacctgtatcacatgaaacattctctcagatactttgaagaagagtccaaggatctggccggccgcctgcaacgttcatcgcagcgtataggagagttagagtggtctctctgtgctgtcgccgccacacagaagaagaagccggatgggttctcgagccgcagtaaagcacttctcaagcggcagttagagcagtccatacgggagcagatactgctgaaaggacacgtgacacagttgaaggagtcgcttaaagaagtccagctggagagagatcaatatgctgaacaaataaaaggagagagggcccagtggcagcagaggatgaggaaaatgtcgcaggaggtttgcacattgaaggaggagaagaagcatgatacgcatcgggtagaggagctggagaggagcttgtccagactcaaaaaccagatggctgagccactgcccccggatgccccagcagtgtcctctgaggtggagctgcaagacctgaggaaggagctggagagagtggcaggagagctccaggctcaggtggaaaacaatcagtgcatcagtctcctgaaccgtgggcaaaaggagaggcttcgcgagcaggaggagaggcttcaggagcagcaggagaggcttcgggaacaggagaagaggcttcagcagctgtccgagccacagagcgacttggaggagctgcacgagaacaagagcgcactgcagttggagcagcaagtaaaggagctgcaggagaagctgggccaggtgacggagacgctcacctcggctgagaaggagccagaggcagcagtcccagcctcagggactgggggcgagtctagcggccttatggacctcctggaggagaaggtggacctgagggagcatgtggagaaactggaacttggattcatccagtaccggagagagagatgccatcagaaagtacatcgccttctaacagagccaggggacagtgccaaagatgcgtcaccgggaggaggccatcatcaggctggcccaggacgaggaggagaggaaggtgaagctgttggagctgcaggagatggtgttgcggcttgtggcagctatagcgaggggcacggcaaattcctggccgctgcccggaaccctgctgctgaacccagtccaggagccccagccccccaggagctcggggctgccgacaagcatggtgatctttgtgaggcgagcctcaccaacagcgtggagcctgcacaaggagaagccagggagggttcttcccaggacaaccctactgcacagccagtcgtgcagctccttggtgagatgcaggaccaccaggagcacccaggcttgggcagcaactgctgtgtgccatgcttttgctgggcttggctgccgagaagaaggagataaacaccaccatcatcaaagagctgctcaagaaatttttaaaaacgaaacaaagttatggggttaatctcctacacaattcatttacttcatttgaatgttagagctactcatgattatttgtgtttctaatttatagtttaagtttatttgtaaaaagttaaaagagagtgggtctctgtgcctctcactgatgttcactctggcatcctttagcatttttcttttttcatttcataattgtaggtcattagcatgcatatcgagtttgcccttacgtggtgggagttcaaacacacaaagacccactctttgcacaaaactgttctcgctggtttggaataggctcccgtgcttttttaatgttattgcagcatggatgttcattacagaattcagataaaatttgctaatgttctgctatgatgtttgatctcatcttaatcacagtgagctcttccatagctcaatatgcggtttgccctcaagtgtgcactgtttattactttgtaatatgccactatgagtactgacacttagagctgtttaaaggccgagaactggaaacagcctttcctccattttctgtgtattggtgatgggagtgataaccttttgggggagctttctaaatctcgcagaagaggaaagtggcctgctctggcaggtatgtgcaggatacagtgtgtttcatctgttccggtgccaagaatgagcactgtactgtggcagttccctttggatttgtatgtgctctgggctcatgaagatattgcatcgtgagctgcagcagttgcactctttttcagtgacctaaaaatggcttatttccgaggaatgaaaggctgccatcgttggctgtggatgtggaaaacctttcctagcttagagcatttgtatctacaatacattttaaagtcagagttcgtgttccctgttttaatcacatgactacctgtgccagtacacgaaagggcgctggttggcattcttcttaatgtatttagtaaagatcataagacatcctttaagagtttaaatgtctctgaaacaggcatacaggctctagtcaagaatgaattagagtgaaggaaagctgtgtgacacctggcattcctctctgttcatggagcttctttgaggcttgaagtttgattttactatctagacctctctggctaatacctattctccaaccacctcggttactctgacataggaatttacttcttttccttgagtggaaaacactttagaaaataataacaaacattattataaactaatatatgtgagagtacttagttgaaacaaaaaggaattttagtagacagtattatattatctttgaaaatcaaggagaagtttatgcaactgaaaatgtttacacactgtgctgcaatctactgtttgtgaatgtcaatgtattatcaggaaacatggctatacgatcgcagagttgtatttcctcacaaacttctttacgaagagtgaaatatgtttttgtacctctcagtttcagtcagggacatattttgtgcaatatttctgtgattgtgcctatgcgtgatgagtgaatgcatttcaatcatacattgcctaaatcataacttgatgatgcttgggaaagaatcaacagttaaaacttcatgaagttc

SEQ ID NO: 237 - DNA, 2329 bp, Homo sapiens
aggacctgagctcagcttccgccccagccagggaagcggcaggggaaagcaccggctccaggccagcgtgggccgctctctcgctcggtgcccgccgccatgtgggccgtcctgaggttagccctgcggccgtgtgcccgcgcctctcccgccgggccgcgcgcctatcacggggactcggtggcctcgctgggcacccagccggacttgggctctgccctctaccaggagaactacaagcagatgaaagcactagtaaatcagctccatgaacgagtggagcatataaaactaggaggtggtgagaaagcccgagcacttcacatatcaagaggaaaactattgcccagagaaagaattgacaatctcatagacccagggtctccatttctggaattatcccagtttgcaggttaccagttatatgacaatgaggaggtgccaggaggtggcattattacaggcattggaagagtatcaggagtagaatgcatgattattgccaatgatgccaccgtcaaaggaggtgcctactacccagtgactgtgaaaaaacaattacgggcccaagaaattgccatgcaaaacaggctcccctgcatctacttagttgattcgggaggagcatacttacctcgacaagcagatgtgtttccagatcgagaccactttggccgtacattctataatcaggcaattatgtcttctaaaaatattgcacagatcgcagtggtcatgggctcctgcaccgcaggaggagcctatgtgcctgccatggctgatgaaaacatcattgtacgcaagcagggtaccattttcttggcaggaccccccttggttaaagcggcaactggggaagaagtatctgctgaggatcttggaggtgctgatcttcattgcagaaagtctggagtaagtgaccactgggctttggatgatcatcatgcccttcacttaactaggaaggttgtgaggaatctaaattatcagaagaaattggatgtcaccattgaaccttctgaagagcctttatttcctgctgatgaattgtatggaatagttggtgctaaccttaagaggagctttgatgtccgagaggtcattgctagaatcgtggatggaagcagattcactgagttcaaagccttttatggagacacattagttacaggatttgctcgaatatttgggtacccagtaggtatcgttggaaacaacggagttctcttttctgaatctgcaaaaaagggtactcactttgtccagttatgctgccaaagaaatattcctctgctgttccttcaaaacattactggatttatggttggtagagagtatgaagctgaaggaattgccaaggatggtgccaagatggtggccgctgtggcctgtgcccaagtgcctaagataaccctcatcattgggggctcctatggagccggaaactatgggatgtgtggcagagcgtatagcccaagatttctctacatttggccaaatgctcgtatctcagtgatgggaggagagcaggcagccaatgtgttggccacgataacaaaggaccaaagagcccgggaaggaaagcagttctccagtgctgatgaagcggctttaaaagagcccatcattaagaagtttgaagaggaaggaaacccttactattccagcgcaagggtatgggatgatgggatcattgatccagcagacaccagactggtcttgggtctcagttttagtgcagccctcaacgcaccaatagagaagactgacttcggtatcttcaggatgtaactggaataaaggatgttttctgttggacatgtactgaaaattaacacatgtagtagccttaaaattttagacttctcgaacatgaggctgttacagtaatttttttaacactgtgcattgtacttttctaccttaaaaaaatcagtgaggatatttatttaatgaacatcaattccttttaaattttcttagagaaatttctctgtggctcagttttaccacccataaagcggagacagtaatttatggttatcctttctgacccacaaagtatgaaaagttctgtaatctgtaaactcagttctgtaatctgtattattgagatgattaatataaagttgtattttcactgaaatgattgttttgctggttatgcttggtgatattttagcgggcttatttttgaaaggcatctgttacttcagttgcataaagtgccctcacactgctgtgcagccattaccaccattcatctccagaatttgttctcagtcccaaactgaaactataccattcaaacaacagcgctccccatttc

SEQ ID NO: 238 - DNA, 4059 bp, Homo sapiens; identical to SEQ ID NO: 192

SEQ ID NO: 239 - DNA, 2355 bp, Homo sapiens
gcagaggaggcggcggaacaccccgggttggtcgggtttccaagggctgacccgagctccagcactttttccgcgcctgatttttcagagctcttcagaaaccaggctgctttcaggaacattgctgtggattcccagggcctattccactagaagcaagatggctgaactcaatactcatgtgaatgtcaaggaaaagatctatgcagttagatcagttgttcccaacaaaagcaataatgaaatagtcctggtgctccaacagtttgattttaatgtggataaagccgtgcaagcctttgtggatggcagtgcaattcaagttctaaaagaatggaatatgacaggaaaaaagaagaacaataaaagaaaaagaagcaagtccaagcagcatcaaggcaacaaagatgctaaagacaaggtggagaggcctgaggcagggcccctgcagccgcagccaccacagattcaaaacggccccatgaatggctgcgagaaggacagctcgtccacagattctgctaacgaaaaaccagcccttatccctcgtgagaaaaagatctcgatacttgaggaaccttcaaaggcacttcgtggggtcacagaaggcaacagactactgcaacagaaactatccttagatgggaaccccaaacctatacatggaacaacagagaggtcagatggcctacagtggtcagctgagcagccttgtaacccaagcaagcctaaggcaaaaacatctcctgttaagtccaatacccctgcagctcatcttgaaataaagccagatgagttggcaaagaaaagaggcccaaatattgagaaatcagtgaaggatttgcaacgctgcaccgtttctctaactagatatcgcgtcatgattaaggaagaagtggatagttccgtgaagaagatcaaagctgcctttgctgaattacacaactgcatcattgacaaagaagtttcattaatggcagaaatggataaagttaaagaagaagccatggaaatcctgactgctcgtcagaagaaagcagaagaactaaagagactcactaaccttgccagtcagatggcagagatgcagctggccgaactcagggcagaaattaagcactttgtcagcgagcgtaaatatgacgaggagctcgggaaagctgcccggttttcctgtgacatcgaacagctgaaggcccaaatcatgctctgcggagaaattacacatccaaagaacaactattcctcaagaactccctgcagctccctgctgcctctgctgaatgcgcacgcagcaacctctgggaaacagagtaacttttcccgaaaatcatccactcacaataagccctctgaaggcaaagcggcaaaccccaaaatggtgagcagtctccccagcaccgccgacccctctcaccagaccatgccggccaacaagcagaatggatcttctaaccaaagacggagatttaatccacagtatcataacaacaggctaaatgggcctgccaagtcgcagggcagtgggaatgaagccgagccactgggaaagggcaacagccgccacgaacacagaagacagccgcacaacggcttccggcccaaaaacaaaggcggtgccaaaaatcaagaggcttccttggggatgaagacccccgaggccccggcccattctgaaaagccccggcgaaggcagcacgctgcagacacctcggaggccaggcccttccggggtagtgtcggtagggtttcacagtgcaatctctgccccacgagaatagaagtttccacagatgcagcagttctctcagtcccggctgtgacgttggtggcctgagctaggaggaaaaagagcagttttcactcagttttggttccctgcccgaggtgctgacccaattcgctgccaaaagagtgtcaatcagaatatacaaatcccgtatggttgtgtcatcctctcttaatcatttttactaattctaataatcagctctagcttgcttcataattttcatggctttgcttgatctgttgatgctttctctcatcaagactttgcagcattttagccaggcagtatttactcattattaggaaaatcaagatgtggctgaagatcagaggctcagttagcaacctgtgttgtagcagtgatgtcagtccatagattgtctttagagagttaatgttacaaaaaagaattcttaataatcagacaaacatgatctgctgaggacacatgcgcttttgtagaatttaacatctggtgtttttctgaaaaaatatatatacatatattgctttatttgaaacaaattaaaatatgctgcatttgaaaaaaaaaaaaaaaaaaaa

SEQ ID NO: 240 - DNA, 4452 bp, Homo sapiens
atgtttgtttcagacacagttctaaaggaacgcctggatccagaaacactggaatcattagggcttatcaaacaatcacagcaattcaatcaaaagtcagttaaaatcaagacaaaactcttttataagcagcaaaaattcaatttgttaagagaagagaatgaaggttatgccaagctgattgctgaattggggcaagatttatctggaagtattactagtgatttaatcttagaaaatatcaaatctttaataggatgctttaatctggatcccaatagagttttggatgtcattttagaagtgtttgaatgcaggccagaacacgatgacttctttatatctttgttagaatcttacatgagtatgtgtgaaccgcaaacactgtgtcatattcttgggttcaaattcaagttttaccaggaaccaaatggcgagacaccatcatctttatacagagttgcagcagtacttctacaatttaatcttattgatttagatgatctttatgtacatcttcttccggctgataattgcattatggatgaacacaaacgagaaattgcggaagctaagcaaattgttagaaagcttacgatggttgtgttgtcttctgaaaaaatggatgagcgagagaaagaaaaggaaaaagaagaggagaaagtagagaaaccacctgataaccaaaaacttggcttgttggaagccttattaaagattggtgattggcaacatgcacagaacattatggatcagatgcctccatactatgcagcttcacacaagctaatagcccttgctatttgcaagctcattcatataactattgagcctctctaccgaagagttggagttcctaaaggtgctaaaggctcacctgttaatgctttgcaaaacaagagagcaccaaaacaagctgagagctttgaagatttgaggagagacgtgttcaatatgttctgttaccttggtcctcacctttctcacgatcccattttatttgcaaaagtggtgcgcataggcaagtcatttatgaaggagtttcagtctgatggaagcaaacaagaagataaagaaaaaacggaagttatccttagctgtttgcttagcattactgaccaggtactacttccatctctttctttgatggactgcaatgcttgtatgtctgaggaactatggggaatgtttaaaacatttccatatcagcatagatatcgtctgtatggccagtggaagaatgaaacttataacagtcacccacttttagtaaaagttaaagctcaaacaatagacagagccaaatatatcatgaagcgcctaaccaaggaaaatgtgaagccttctggaagacaaattgggaagttgagccacagcaatccaaccattttgtttgattatatcttgtcacaaatacagaagtatgataacttaataacacctgtagtagattcattgaaatacctcacttcactgaattatgatgtcttggcctattgtatcattgaagctttagctaatccagaaaaggaaagaatgaaacatgatgacacaaccatctcaagctggcttcagagtctggctagtttctgtggtgcagtttttcgtaaatatccaattgatcttgctggtcttcttcagtatgttgccaatcagctaaaggcgggcaaaagttttgacctgcttatattgaaagaagtggtacaaaaaatggcaggaatagaaattacagaggaaatgacaatggagcaactagaggctatgactggtggagagcagctaaaagctgagggtggttattttggtcagatcagaaacactaaaaaatcctctcagagattaaaggatgctctattggaccatgatcttgcccttcctctctgtctgcttatggctcagcagagaaatggggtaatctttcaggaaggtggagagaaacatttgaaacttgtgggaaagctctatgaccagtgtcatgataccctggtgcagtttggtgggtttttagcatctaatctgagcacagaagattatataaagcgagtgccttcaattgatgtactctgtaatgaatttcatacaccccatgatgcagcatttttcctgtctaggccaatgtatgcccatcatatttcgtcaaagtatgatgaacttaaaaaatcagaaaagggaagtaaacagcaacataaagttcataagtacattacatcatgtgagatggtgatggcgcctgtccatgaagcagtggtctccttacatgtttccaaagtctgggatgacatcagccctcaattctatgctacattctggtcattgacaatgtatgaccttgcagttccacacaccagctatgaacgagaagtcaataaacttaaagtccagatgaaagcaattgatgacaatcaggaaatgcccccaaataaaaagaaaaaagagaaggagcgctgtactgcccttcaggacaagcttcttgaagaagaaaagaaacagatggaacatgtacagagagttctacagagattgaaactggaaaaggacaactggcttttagcaaaatctaccaaaaatgagaccatcacaaaatttctacagctgtgtatatttcctcgatgtattttttcagcaattgatgctgtttactgtgctcgttttgttgaattggtacatcaacagaaaactccaaatttttccacacttctttgctatgatcgagttttctctgacataatttacacagttgcaagctgtactgaaaatgaagccagtcgatacggaaggtttctttgctgcatgttagagactgtgaccaggtggcatagtgatagagccacatatgaaaaggaatgtggaaactatccaggattccttaccatattacgggcaactggatttgatggtggaaataaggctgatcaattagactatgaaaattttcgacatgttgtacataaatggcattacaaactaaccaaggcatcggtacattgccttgaaacaggcgaatatactcacatcaggaatatcttgattgtgctaacaaaaatacttccttggtacccaaaagttttgaatctgggtcaagctttggaaagaagagtacacaaaatctgccaagaagaaaaagagaagaggccagatctatatgcattggctatgggctactctgggcagttgaaaagtagaaagtcatacatgatacctgaaaatgagtttcatcacaaagacccccctccgaggaatgcagttgccagtgtgcaaaatgggcctggtggtgggccttcttcatcatcaataggaagtgcatctaaatcggatgaaagcagtactgaggagactgataaatcaagggagagatctcagtgtggtgtgaaagctgttaataaagcttctagtaccacacctaaagggaattcaagcaatggaaatagtggctctaacagcaacaaagctgttaaagaaaatgacaaagaaaaagggaaagagaaagaaaaagagaaaaaagaaaagactccagctactactccagaggccagggtacttggtaaagatggtaaagaaaaaccaaaggaagagcggccaaataaagatgaaaaagcaagagagaccaaggaaagaacgccgaagtctgacaaagagaaagaaaaattcaagaaggaagaaaaagctaaagatgagaaatttaagaccactgtccccaacgcagaatcaaaatcaactcaagaaagggaaagagagaaggagccatccagagaaagagatatagcaaaggaaatgaaatcaaaggaaaatgttaaaggaggagaaaaaacaccagtttctgggtccttgaaatcacctgttcccagatcagatattccagagcctgaaagggaacaaaaacgccgcaaaattgatactcacccttctccatcacattcctccacagtaaaggacagtctcatcgaactcaaggaatcttcagcaaagctctacattaatcatactcctccaccactgtccaagagtaaggagagagaaatggacaagaaagatttggacaagtcaagggaaagatccagagaaagagagaaaaaagatgaaaaggacaggaaagagcggaaaagggatcactcaaacaacgaccgtgaagtgccaccggacttaaccaagagacgtaaagaggagaatggaacaatgggggtttcaaaacataaaagtgaaagtccttgtgaatctccttatccaaatgagaaagacaaggaaaaaaataagtcaaaatcttcaggcaaagaaaaaggcagtgattcatttaaatctgagaagatggataaaatctcctccggtggcaaaaaggagtccaggcatgataaagaaaagatagaaaagaaagagaaacgggacagttcaggaggaaaggaagagaagaaacatcataagtcctcggacaagcacagataatgaagactttccatc

SEQ ID NO: 241 - DNA, 4950 bp, Homo sapiens
cagagcagggtggagagggcggtgggaggcgtgtgcctgagtgggctctactgccttgttccatattattttgtgcacattttccctggcactctgggttgctagccccgccgggcactgggcctcagacactgcgcggttccctcggagcagcaagctaaagaaagcccccagtgccggcgaggaaggaggcggcggggaaagatgcgcggcgttggctggcagatgctgtccctgtcgctggggttagtgctggcgatcctgaacaaggtggcaccgcaggcgtgcccggcgcagtgctcttgctcgggcagcacagtggactgtcacgggctggcgctgcgcagcgtgcccaggaatatcccccgcaacaccgagagactggatttaaatggaaataacatcacaagaattacgaagacagattttgctggtcttagacatctaagagttcttcagcttatggagaataagattagcaccattgaaagaggagcattccaggatcttaaagaactagagagactgcgtttaaacagaaatcaccttcagctgtttcctgagttgctgtttcttgggactgcgaagctatacaggcttgatctcagtgaaaaccaaattcaggcaatcccaaggaaagctttccgtggggcagttgacataaaaaatttgcaactggattacaaccagatcagctgtattgaagatggggcattcagggctctccgggacctggaagtgctcactctcaacaataacaacattactagactttctgtggcaagtttcaaccatatgcctaaacttaggacttttcgactgcattcaaacaacctgtattgtgactgccacctggcctggctctccgactggcttcgccaaaggcctcgggttggtctgtacactcagtgtatgggcccctcccacctgagaggccataatgtagccgaggttcaaaaacgagaatttgtctgcagtggtcaccagtcatttatggctccttcttgtagtgttttgcactgccctgccgcctgtacctgtagcaacaatatcgtagactgtcgtgggaaaggtctcactgagatccccacaaatcttccagagaccatcacagaaatacgtttggaacagaacacaatcaaagtcatccctcctggagctttctcaccatataaaaagcttagacgaattgacctgagcaataatcagatctctgaacttgcaccagatgctttccaaggactacgctctctgaattcacttgtcctctatggaaataaaatcacagaactccccaaaagtttatttgaaggactgttttccttacagctcctattattgaatgccaacaagataaactgccttcgggtagatgcttttcaggatctccacaacttgaaccttctctccctatatgacaacaagcttcagaccatcgccaaggggaccttttcacctcttcgggccattcaaactatgcatttggcccagaacccctttatttgtgactgccatctcaagtggctagcggattatctccataccaacccgattgagaccagtggtgcccgttgcaccagcccccgccgcctggcaaacaaaagaattggacagatcaaaagcaagaaattccgttgttcagctaaagaacagtatttcattccaggtacagaagattatcgatcaaaattaagtggagactgctttgcggatctggcttgccctgaaaagtgtcgctgtgaaggaaccacagtagattgctctaatcaaaagctcaacaaaatcccggagcacattccccagtacactgcagagttgcgtctcaataataatgaatttaccgtgttggaagccacaggaatctttaagaaacttcctcaattacgtaaaataaactttagcaacaataagatcacagatattgaggagggagcatttgaaggagcatctggtgtaaatgaaatacttcttacgagtaatcgtttggaaaatgtgcagcataagatgttcaagggattggaaagcctcaaaactttgatgttgagaagcaatcgaataacctgtgtggggaatgacagtttcataggactcagttctgtgcgtttgctttctttgtatgataatcaaattactacagttgcaccaggggcatttgatactctccattctttatctactctaaacctcttggccaatccttttaactgtaactgctacctggcttggttgggagagtggctgagaaagaagagaattgtcacgggaaatcctagatgtcaaaaaccatacttcctgaaagaaatacccatccaggatgtggccattcaggacttcacttgtgatgacggaaatgatgacaatagttgctccccactttctcgctgtcctactgaatgtacttgcttggatacagtcgtccgatgtagcaacaagggtttgaaggtcttgccgaaaggtattccaagagatgtcacagagttgtatctggatggaaaccaatttacactggttcccaaggaactctccaactacaaacatttaacacttatagacttaagtaacaacagaataagcacgctttctaatcagagcttcagcaacatgacccagctcctcaccttaattcttagttacaaccgtctgagatgtattcctcctcgcacctttgatggattaaagtctcttcgattactttctctacatggaaatgacatttctgttgtgcctgaaggtgctttcaatgatctttctgcattatcacatctagcaattggagccaaccctctttactgtgattgtaacatgcagtggttatccgactgggtgaagtcggaatataaggagcctggaattgctcgttgtgctggtcctggagaaatggcagataaacttttactcacaactccctccaaaaaatttacctgtcaaggtcctgtggatgtcaatattctagctaagtgtaacccctgcctatcaaatccgtgtaaaaatgatggcacatgtaatagtgatccagttgacttttaccgatgcacctgtccatatggtttcaaggggcaggactgtgatgtcccaattcatgcctgcatcagtaacccatgtaaacatggaggaacttgccacttaaaggaaggagaagaagatggattctggtgtatttgtgctgatggatttgaaggagaaaattgtgaagtcaacgttgatgattgtgaagataatgactgtgaaaataattctacatgtgtcgatggcattaataactacacatgcctttgcccacctgagtatacaggtgagttgtgtgaggagaagctggacttctgtgcccaggacctgaacccctgccagcacgattcaaagtgcatcctaactccaaagggattcaaatgtgactgcacaccagggtacgtaggtgaacactgcgacatcgattttgacgactgccaagacaacaagtgtaaaaacggagcccactgcacagatgcagtgaacggctatacgtgcatatgccccgaaggttacagtggcttgttctgtgagttttctccacccatggtcctccctcgtaccagcccctgtgataattttgattgtcagaatggagctcagtgtatcgtcagaataaatgagccaatatgtcagtgtttgcctggctatcagggagaaaagtgtgaaaaattggttagtgtgaattttataaacaaagagtcttatcttcagattccttcagccaaggttcggcctcagacgaacataacacttcagattgccacagatgaagacagcggaatcctcctgtataagggtgacaaagaccatatcgcggtagaactctatcgggggcgtgttcgtgccagctatgacaccggctctcatccagcttctgccatttacagtgtggagacaatcaatgatggaaacttccacattgtggaactacttgccttggatcagagtctctctttgtccgtggatggtgggaaccccaaaatcatcactaacttgtcaaagcagtccactctgaattttgactctccactctatgtaggaggcatgccagggaagagtaacgtggcatctctgcgccaggcccctgggcagaacggaaccagcttccacggctgcatccggaacctttacatcaacagtgagctgcaggacttccagaaggtgccgatgcaaacaggcattttgcctggctgtgagccatgccacaagaaggtgtgtgcccatggcacatgccagcccagcagccaggcaggcttcacctgcgagtgccaggaaggatggatggggcccctctgtgaccaacggaccaatgacccttgccttggaaataaatgcgtacatggcacctgcttgcccatcaatgcgttctcctacagctgtaagtgcttggagggccatggaggtgtcctctgtgatgaagaggaggatctgtttaacccatgccaggcgatcaagtgcaagcacgggaagtgcaggctttcaggtctggggcagccctactgtgaatgcagcagtggatacacgggggacagctgtgatcgagaaatctcttgtcgaggggaaaggataagagattattaccaaaagcagcagggctatgctgcttgccaaacaaccaagaaggtgtcccgattagagtgcagaggtgggtgtgcaggagggcagtgctgtggaccgctgaggagcaagcggcggaaatactctttcgaatgcactgacggctcctcctttgtggacgaggttgagaaagtggtgaagtgcggctgtacgaggtgtgtgtcctaaacacactcccggcagctctgtctttggaaaaggttgtatacttcttgaccatgtgggactaatgaatgcttcatagtggaaatatttgaaatatattgtaaaatacagaacagacttatttttattatgagaataaagactttttttctgcatttg

SEQ ID NO: 242 - DNA, 4308 bp, Homo sapiens
gctggccccgccccctagcgccgcggtcggagccatttcgccgattcctccatgcgagttgctgtgcgtttctctgttgtctcggtagaaggccagagtcacacacggtcctaagagctgggcaccaggaagcgaaggctgatctgaagaagacacttgaatcatgggtgacgttaaaaattttctgtatgcctggtgtggcaaaaggaagatgaccccatcctatgaaattagagcagtggggaacaaaaacaggcagaaattcatgtgtgaggttcaggtggaaggttataattacactggcatgggaaattccaccaataaaaaagatgcacaaagcaatgctgccagagactttgttaactatttggttcgaataaatgaaataaagagtgaagaagttccagcttttggggtagcatctccgcccccacttactgatactcctgacactacagcaaatgctgaaggagatttaccaacaaccatgggaggacctcttcctccacatctggctctcaaagcagaaaataattctgaggtaggggcctctggctatggtgttcctgggcccacctgggaccgaggagccaacttgaaggattactactcaagaaaggaagaacaagaagtgcaagcgactctagaatcagaagaagtggatttaaatgctgggcttcatggaaactggaccttggaaaatgctaaagctcgtctaaaccaatattttcagaaagaaaagatccaaggagaatataagtacacccaagtgggtcctgatcacaacaggagctttattgcagaaatgaccatttatatcaagcagctgggcagaaggatttttgcacgagaacatggatcaaataagaaattggcagcacagtcctgtgccctgtcacttgtcagacaactgtaccatcttggagtggttgaagcttactccggacttacaaagaagaaggaaggagagacagtggagccttacaaagtaaacctctctcaagatttagagcatcagctgcaaaacatcattcaagagctaaatcttgagattttgcccccgcctgaagatccttctgtgccagttgcactcaacattggcaaattggctcagttcgaaccatctcagcgacaaaaccaagtgggtgtggttccttggtcacctccacaatccaactggaatccttggactagtagcaacattgatgaggggcctctggcttttgctactccagagcaaataagcatggacctcaagaatgaattgatgtaccagttggaacaggatcatgatttgcaagcaatcttgcaggagagagagttactgcctgtgaagaaatttgaaagtgagattctggaagcaatcagccaaaattcagttgtcattattagaggggctactggatgtgggaaaaccacacaggttccccagttcattctagatgactttatccagaatgaccgagcagcagagtgtaacatcgtagtaactcagcccagaagaatcagtgcggtttctgtggcagagcgagttgcatttgaaagaggagaagagcctggaaaaagctgtggctacagcgttcgatttgagtctatacttcctcgtcctcatgccagtataatgttttgtactgtaggtgtgctcctgagaaaattagaagcaggcattcgaggaatcagtcatgtaattgtagatgaaatacatgaaagagatattaatactgacttccttttggtagtactgcgtgatgttgttcaggcttatcctgaagttcgcattgttcttatgtctgctactattgataccagcatgttttgtgaatatttcttcaattgccccatcattgaagtttatgggaggacttacccagttcaagaatattttctggaagactgcattcagatgacccactttgttcctccaccaaaagacaaaaagaagaaggataaggatgatgatggtggtgaggatgatgatgcaaattgcaacttgatctgtggtgatgaatatggtccagaaacaaggttgagcatgtctcaattgaacgaaaaggaaactccttttgaactcatcgaggctctacttaagtacattgaaacccttaatgttcctggagctgtgttggtttttttgcctggctggaatctgatttatactatgcagaagcatttggaaatgaatccacattttggaagccatcggtatcagattctacccctgcattctcagattcctcgagaggaacagcgcaaagtgtttgatccagtaccagttggagtaaccaaggttattttgtccacaaatattgctgaaacaagcattaccataaacgatgttgtttatgtcattgactcctgcaagcagaaagtgaaactcttcactgctcacaacaatatgaccaactatgctaccgtatgggcatcaaaaacaaaccttgagcaacggaaagggcgagctggccgagtacggcctggattctgctttcacctgtgcagccgagctcgttttgagagacttgaaacccacatgacaccagagatgttccgaacaccattgcatgaaattgctcttagcataaaacttctgcgtctaggaggaattggccaatttctggccaaagcaattgaacctccccctttggatgctgtgattgaagcagaacacactcttagagagcttgatgcattagatgccaatgatgagttgactcctttgggacgaatcctggctaaactccccattgagcctcgttttggcaaaatgatgataatggggtgtattttctacgtgggagatgctatctgtaccattgctgctgctacctgctttccagagcctttcatcaatgaaggaaagcggctgggctatatccatcgaaattttgctggaaacagattttctgatcacgtagcccttttatcagtattccaagcctgggatgatgctagaatgggtggagaagaagcagagatacgtttttgtgagcacaaaagacttaatatggctacactaagaatgacctgggaagccaaagttcagctcaaagagattttgattaattctgggtttccagaagattgtttgttgacacaagtgtttactaacactggaccagataataatttggatgttgttatctccctcctggcctttggtgtgtaccccaatgtatgctatcataaggaaaagaggaagattctcaccactgaagggcgtaatgcacttatccacaaatcatctgttaattgtccttttagtagccaagacatgaagtacccatctcccttctttgtatttggtgaaaagattcgaactcgagccatctctgctaaaggcatgactttagtcacccccctgcagttgcttctctttgcctccaagaaagtccaatctgatgggcagattgtgcttgtagatgactggattaaactgcaaatatctcatgaagctgctgcctgtatcactggtctccgggcagccatggaggctttggttgttgaagtaaccaaacaacctgctatcatcagccagttggaccccgtaaatgaacgtatgctgaacatgatccgtcagatctctagaccctcagctgctggtatcaaccttatgattggcagtacacggtatggagatggtccacgtcctcccaagatggcccgatacgacaatggaagcggatatagaaggggaggttctagttacagtggtggaggctatggcggtggctatagcagtggaggctatggtagcggaggctatggtggcagcgccaactcctttcgggcaggatatggtgcaggtgttggtggaggctatagaggagtttcccgaggtggctttagaggcaactctggaggagactacagagggcctagtggaggctacagaggatctgggggattccagcgaggaggtggtaggggggcctatggaactggctactttggacagggaagaggaggtggcggctattaaaacttggttatgtcagttcctgtgtgtagacagtaaggaaaaaaaggcatgctatgtgttacgtgttttttccagtatgtttatttgccaccaaaaagtaaatgcattttcacccattctgtggttcattgtagtttaaggaaaccaagcatatagatgcattagtgattttgtttatattatgtaaaatataacgatctcttaaaaataccacagtttgtattttttctttaaggagtaaagatttgcctttaaataacttggtattttcctggctttcgtttaatacaatagaaaataaagtattacaccgaaaaaaaaaaaaaaaaaaa

SEQ ID NO: 243 - DNA, 2171 bp, Homo sapiens
gggcagtggctcgtgggagccaagatggcggcggcggcggcagcgacagcagcagcagcagccagtattcgggaaaggcagacagtggctttgaagcgtatgttgaatttcaatgtgcctcatattaaaaacagcacaggagaaccagtatggaaggtactcatttatgacagatttggccaagatataatctctcctctgctatctgtgaaggagctaagagacatgggaatcactctgcatctgcttttacactctgatcgagatcctattccagatgttcctgcagtatactttgtaatgccaactgaagaaaatattgacagaatgtgccaggatcttcgaaatcaactatatgaatcatattatttaaattttatttctgctatttcaagaagtaaactggaagatattgcaaatgcagcgttagcagctagtgcagtaacacaagtagccaaggtttttgaccaatatctcaattttattactttggaagatgatatgtttgtattatgtaatcaaaataaggagcttgtttcatatcgtgccattaacaggccagatatcacagacacggaaatggaaactgttatggacactatagttgacagcctcttctgcttttttgttactctgggtgctgttcctataatcagatgttcaagaggaacagcagcagaaatggtagcagtgaaactagacaagaaacttcgagaaaatctaagagatgcaagaaacagtctttttacaggtgatacacttggagctggccaattcagcttccagaggcccttattagtccttgttgacagaaacatagatttggcaactcctttacatcatacttggacatatcaagcattggtgcacgatgtactggatttccatttaaacagggttaatttggaagaatcttcaggagtggaaaactctccagctggtgctagaccaaagagaaaaaacaagaagtcttatgatttaactccggttgataaattttggcaaaaacataaaggaagtccattcccagaagttgcagaatcagttcagcaagaactagaatcttacagagcacaggaagatgaggtcaaacgacttaaaagcattatgggactagaaggggaagatgaaggagccataagtatgctttctgacaataccgctaagctaacatcagctgttagttctttgccagaactccttgagaaaaaaagacttattgatctccatacaaatgttgccactgctgttttagaacatataaaggcaagaaaattggatgtatattttgaatatgaagaaaaaataatgagcaaaactactctggataaatctcttctagatataatatcagaccctgatgcaggaactccagaagataaaatgaggttgtttcttatctattatataagcacacagcaagcaccttctgaggctgatttggagcaatataaaaaagctttaactgatgcaggatgcaaccttaatcctttacaatatatcaaacagtggaaggcttttaccaagatggcctcagctccggccagctatggcagcactaccactaaaccaatgggtcttttatcacgagtcatgaatacaggatcacagtttgtgatggaaggagtgaagaacctggttttgaaacagcaaaatctacctgttactcgtattttggacaatcttatggagatgaagtcaaaccccgaaactgatgactatagatattttgatcccaaaatgctgcggggcaatgacagctcagttcccagaaataaaaatccattccaagaggccattgtttttgtggtgggaggaggcaactacattgaatatcagaatcttgttgactacataaaggggaaacaaggcaaacacattttatatggctgcagtgagctttttaatgctacacagttcataaaacagttgtcacaacttggacaaaagtaacacagaagaaccttactatgataatctacttggaatgtggataaatgtaaaaagaagaaaagttagaagagcaatatgtttccttctctgtaacagtgtcctaacagtgaaaatcagagttatttgttaatttttaaggaaattatatacttaatatgtattgattaaaagaaacatttcagaaataaaatttcaacattgttaaaaaaaaaaaaaaa

SEQ ID NO: 244 - DNA, 2101 bp, Homo sapiens
gggcagtggctcgtgggagccaagatggcggcggcggcggcagcgacagcagcagcagcagccagtattcgggaaaggcagacaggtactcatttatgacagatttggccaagatataatctctcctctgctatctgtgaaggagctaagagacatgggaatcactctgcatctgcttttacactctgatcgagatcctattccagatgttcctgcagtatactttgtaatgccaactgaagaaaatattgacagaatgtgccaggatcttcgaaatcaactatatgaatcatattatttaaattttatttctgctatttcaagaagtaaactggaagatattgcaaatgcagcgttagcagctagtgcagtaacacaagtagccaaggtttttgaccaatatctcaattttattactttggaagatgatatgtttgtattatgtaatcaaaataaggagcttgtttcatatcgtgccattaacaggccagatatcacagacacggaaatggaaactgttatggacactatagttgacagcctcttctgcttttttgttactctgggtgctgttcctataatcagatgttcaagaggaacagcagcagaaatggtagcagtgaaactagacaagaaacttcgagaaaatctaagagatgcaagaaacagtctttttacaggtgatacacttggagctggccaattcagcttccagaggcccttattagtccttgttgacagaaacatagatttggcaactcctttacatcatacttggacatatcaagcattggtgcacgatgtactggatttccatttaaacagggttaatttggaagaatcttcaggagtggaaaactctccagctggtgctagaccaaagagaaaaaacaagaagtcttatgatttaactccggttgataaattttggcaaaaacataaaggaagtccattcccagaagttgcagaatcagttcagcaagaactagaatcttacagagcacaggaagatgaggtcaaacgacttaaaagcattatgggactagaaggggaagatgaaggagccataagtatgctttctgacaataccgctaagctaacatcagctgttagttctttgccagaactccttgagaaaaaaagacttattgatctccatacaaatgttgccactgctgttttagaacatataaaggcaagaaaattggatgtatattttgaatatgaagaaaaaataatgagcaaaactactctggataaatctcttctagatataatatcagaccctgatgcaggaactccagaagataaaatgaggttgtttcttatctattatataagcacacagcaagcaccttctgaggctgatttggagcaatataaaaaagctttaactgatgcaggatgcaaccttaatcctttacaatatatcaaacagtggaaggcttttaccaagatggcctcagctccggccagctatggcagcactaccactaaaccaatgggtcttttatcacgagtcatgaatacaggatcacagtttgtgatggaaggagtgaagaacctggttttgaaacagcaaaatctacctgttactcgtattttggacaatcttatggagatgaagtcaaaccccgaaactgatgactatagatattttgatcccaaaatgctgcggggcaatgacagctcagttcccagaaataaaaatccattccaagaggccattgtttttgtggtgggaggaggcaactacattgaatatcagaatcttgttgactacataaaggggaaacaaggcaaacacattttatatggctgcagtgagctttttaatgctacacagttcataaaacagttgtcacaacttggacaaaagtaacacagaagaaccttactatgataatctacttggaatgtggataaatgtaaaaagaagaaaagttagaagagcaatatgtttccttctctgtaacagtgtcctaacagtgaaaatcagagttatttgttaatttttaaggaaattatatacttaatatgtattgattaaaagaaacatttcagaaataaaatttcaacattgttaaaaaaaaaaaaaaaa

SEQ ID NO: 245 - DNA, 1373 bp, Homo sapiens
ggggccgcggtctagggcggctacgtgtgttgccatagcgaccattttgcattaactggttggtagcttctatcctgggggctgagcgactgcgggccagctcttcccctactccctctcggctccttgtggcccaaaggcctaaccggggtccggcggtctggcctagggatcttccccgttgcccctttggggcgggatggctgcggaagaagaagacgaggtggagtgggtagtggagagcatcgcggggttcctgcgaggcccagactggtccatccccatcttggactttgtggaacagaaatgtgaagttaactgcaaaggagggcatgtgataactccaggaagcccagagccggtgattttggtggcctgtgttccccttgtttttgatgatgaagaagaaagcaaattgacctatacagagattcatcaggaatacaaagaactagttgaaaagctgttagaaggttacctcaaagaaattggaattaatgaagatcaatttcaagaagcatgcacttctcctcttgcaaagacccatacatcacaggccattttgcaacctgtgttggcagcagaagattttactatctttaaagcaatgatggtccagaaaaacattgaaatgcagctgcaagccattcgaataattcaagagagaaatggtgtattacctgactgcttaaccgatggctctgatgtggtcagtgaccttgaacacgaagagatgaaaatcctgagggaagttcttagaaaatcaaaagaggaatatgaccaggaagaagaaaggaagaggaaaaaacagttatcagaggctaaaacagaagagcccacagtgcattccagtgaagctgcaataatgaataattcccaaggggatggtgaacattttgcacacccaccctcagaagttaaaatgcattttgctaatcagtcaatagaacctttgggaagaaaagtggaaaggtctgaaacttcctccctcccacaaaaaggcctgaagattcctggcttagagcatgcgagcattgaaggaccaatagcaaacttatcagtacttggaacagaagaacttcggcaacgagaacactatctcaagcagaagagagataagttgatgtccatgagaaaggatatgaggactaaacagatacaaaatatggagcagaaaggaaaacccactggggaggtagaggaaatgacagagaaaccagaaatgacagcagaggagaagcaaacattactaaagaggagattgcttgcagagaaactcaaagaagaagttattaataagtaataattaagaacaatttaacaaaatggaagttcaaattgtcttaaaaataaattatttagtccttacactg

SEQ ID NO: 246 - DNA, 3250 bp, Homo sapiens
ccggaggattttgaggacacttgtggagagctcgaattccagaatgatgaaattgttaggttgtgacagttggaagtgtcatgtacaacatgcggcgattaagtctttcacccaccttttcaatgggatttcatctgttagttactgtgagtctcttattttcccatgtggaccatgtaattgctgagacagaaatggaaggagaaggaaatgaaactggtgaatgtactggatcatattactgtaagaaaggggtgattttgcccatttgggaaccccaagacccttcttttggggacaaaattgctagagctactgtgtattttgtggccatggtctacatgtttcttggagtctctatcatagctgatcggttcatgtcctctatagaagtcatcacatctcaagaaaaagaaataaccataaagaaacccaatggagagaccaccaagacaactgtgaggatctggaatgaaacagtttctaacctgaccttgatggccctgggatcttctgctcctgagattctcctttcagtaattgaagtgtgtggccataacttcactgcaggagacctcggtcctagcaccatcgtgggaagtgctgcattcaatatgttcatcattattgcactctgtgtttatgtggtgcctgacggagagacaaggaagattaagcatttgcgtgtcttctttgtgacagcagcctggagcatctttgcctacacctggctttacattattttgtctgtcatatctcctggtgttgtggaggtctgggaaggtttgcttactttcttcttctttcccatctgtgttgtgttcgcttgggtagcggataggagacttctgttttacaagtatgtctacaagaggtatcgagctggcaagcagagggggatgattattgaacatgaaggagacaggccatcttctaagactgaaattgaaatggacgggaaagtggtcaattctcatgttgaaaatttcttagatggtgctctggttctggaggtggatgagagggaccaagatgatgaagaagctaggcgagaaatggctaggattctgaaggaacttaagcagaagcatccagataaagaaatagagcaattaatagaattagctaactaccaagtcctaagtcagcagcaaaaaagtagagcattttatcgcattcaagctactcgcctcatgactggagctggcaacattttaaagaggcatgcagctgaccaagcaaggaaggctgtcagcatgcacgaggtcaacactgaagtgactgaaaatgaccctgttagtaagatcttctttgaacaagggacatatcagtgtctggagaactgtggtactgtggcccttaccattatccgcagaggtggtgatttgactaacactgtgtttgttgacttcagaacagaggatggcacagcaaatgctgggtctgattatgaatttactgaaggaactgtggtgtttaagcctggtgatacccagaaggaaatcagagtgggtatcatagatgatgatatctttgaggaggatgaaaatttccttgtgcatctcagcaatgtcaaagtatcttctgaagcttcagaagatggcatactggaagccaatcatgtttctacacttgcttgcctcggatctccctccactgccactgtaactatttttgatgatgaccacgcaggcatttttacttttgaggaacctgtgactcatgtgagtgagagcattggcatcatggaggtgaaagtattgagaacatctggagctcgaggaaatgttatcgttccatataaaaccatcgaagggactgccagaggtggaggggaggattttgaggacacttgtggagagctcgaattccagaatgatgaaattgtcaaaacaatatcagtcaaggtaattgatgatgaggagtatgagaaaaacaagaccttcttccttgagattggagagccccgcctggtggagatgagtgagaagaaagccctgttattgaatgagcttggtggcttcacaataacaggaaaatacctgtttggccaacctgtcttcaggaaggttcatgctagagaacatccgattctctctactgtaatcaccattgcagacgaatatgatgacaagcagccactgaccagcaaagaggaagaggagaggcgcattgcagaaatggggcgccccatcctgggagagcacaccaagttggaagtgatcattgaagaatcctatgaattcaagagtactgtggacaaactcattaagaagacaaacctggcccttgtggttgggactaacagctggagagaacagttcattgaagctatcactgtcagtgctggggaagatgatgacgacgatgaatgtggggaagagaagctgccctcctgtttcgattacgtgatgcactttctgactgtgttctggaaggtcctgtttgccttcgtcccccctactgaatactggaatggctgggcgtgtttcattgtctccatcctcatgattggcctactgacagctttcattggagacctggcttcccactttggctgcaccattggcctgaaagattctgtgactgcagtcgtgttcgtcgcacttggaacatcagtgccagacacatttgccagcaaagtggcagccacccaggaccagtatgcagacgcctccataggtaacgtcacgggcagcaacgcggtgaatgtcttcctgggaatcggtgtggcctggtccatcgctgccatctaccacgcagccaatggggaacagttcaaagtgtcccctggcacactagctttctctgtcactctcttcaccatttttgctttcatcaatgtgggggtgctgctgtatcggcggaggccagaaatcggaggtgagctgggtgggccccggactgccaagctcctcacatcctgcctctttgtgctcctatggctcttgtacattttcttctcctccctggaggcctactgccacataaaaggcttctaaaggaactatcagatatagtaaatttatatatatacatatatatacataaaaattatgtataatggacagaggaaactgacatttgtcatgttcacttacctgctgatggaatccagcttcaagagcatactctgtactagggccgaagtaaaaaaccatcacctcccattcccaggggcatcatcatgttcaacaaggcatggaggcagggccatctttgcagctcagtctagaagggctgcactctc

SEQ ID NO: 247 - DNA, 5189 bp, Homo sapiens; identical to SEQ ID NO: 198

SEQ ID NO: 248 - DNA, 1629 bp, Homo sapiens
gaagcagggagcgcggagtcgttcccgagagaggcggccaggctatgctcgccggtttccggcgttccgctccggccagccagagtctctgtctcaacctgtgtccgtgctccagcagtctcctcagcccggccccgcggcgcggttggcggcggcgccccaggcgcgccccctcctccgatggcggcggagatccagcccaagcctctgacccgcaagccgatcctgctgcagcggatggaggggtcccaggaggtggtgaatatggccgtgatcgtgcccaaagaggagggcgtcatcagcgtctccgaggacaggacagttcgtgtttggttaaagagagacagtggacagtattggccaagcgtataccatgcaatgccttctccatgttcatgcatgtcttttaacccggaaacaagaagactgtccataggtctagacaatggtacaatctcagagtttatattgtcagaagattataacaagatgactcctgtgaaaaactatcaagcgcatcagagcagagtgacgatgatcctgtttgtcctggagctggagtgggtgctgagcacaggacaggacaagcaatttgcctggcactgctctgagagtgggcagcgcctgggaggttatcggaccagtgctgtggcctcaggcctgcaatttgatgttgaaacccggcatgtgtttatcggtgaccactcaggccaagtaacaatcctcaaactggagcaagaaaactgcaccctggtcacaacattcagaggacacacaggtggggtgaccgctctctgttgggacccagtccagcgggtgttgttctcaggcagttcagatcactctgtcatcatgtgggacatcggtgggagaaaaggaacagccatcgagctccaaggacacaacgacagagtccaggccctctcctatgcacagcacacgcgacaattgatctcctgtggcggtgatggtgggattgtcgtctggaacatggacgtggagaggcaggagacccctgaatggttggacagtgattcctgccaaaagtgtgatcagcctttcttctggaacttcaagcaaatgtgggacagtaagaaaattggtctaagacagcaccactgccgcaagtgtgggaaggccgtctgtggcaagtgcagctccaagcgctcctccatccccctgatgggcttcgagtttgaagtgagggtctgtgacagctgccacgaggccatcacagatgaagaacgtgcacccacagccaccttccatgacagtaaacataacattgtgcatgtgcatttcgatgcaaccagaggatggttactgacttctggaactgacaaggttattaagttgtgggatatgaccccagtcgtgtcttgatgactctcccaggaatcagaaagatagtatttactaaagaaacggttgttttaacccaaatcattaccagagtggtaaagcagacatgtgagaagtaagaaagaaactaaagaccctgaatgaatttgcagattacccatgtgcacagtggggacctggccagtgagcactcgcaaggggactcttccaacttgttcatacaatataaaagaagctatttttttaacaaaaaaaaaaaaaaaaaaa

SEQ ID NO: 249 - DNA, 1764 bp, Homo sapiens
gtggctgaggccggcagcagcgggcggcagctgcggcgcaaccggctccggagctgcctggcgcggccgggcgggcggcgccgctcaggctcgggctccggctgggcccggcgcggcctcggggctgcccatggggcgcggggggccgggccggtgacgccggacgcccatggacgcctctgaggagccgctgccgccggtgatctacaccatggagaacaagcccatcgtcacctgtgctggagatcagaatttatttacctctgtttatccaacgctctctcagcagcttccaagagaaccaatggaatggagaaggtcctatggccgggctccgaagatgattcacctagagtctaactttgttcaattcaaagaggagctgctgcccaaagaaggaaacaaagctctgctcacgtttcccttcctccatatttactggacagagtgctgtgataccgaagtgtataaagctacagtaaaagatgacctcaccaagtggcagaatgttctgaaggctcatagctctgtggactggttaatagtgatagttgaaaatgatgccaagaaaaaaaacaaaaccaacatccttccccgaacctctattgtggacaaaataagaaatgatttttgtaataaacagagtgacaggtgtgttgtgctctccgaccccttgaaggactcttctcgaactcaggaatcctggaatgccttcctgaccaaactcaggacattgcttcttatgtcttttaccaaaaacctaggcaagtttgaggatgacatgagaaccttgagggagaagaggactgagccaggctggagcttttgtgaatatttcatggttcaggaggagcttgcctttgttttcgagatgctgcagcagttcgaggacgccctggtgcagtacgacgaactggacgccctcttctctcagtatgtggtcaacttcggggccgggggtataaaatgtcctttccacaactcagtggcctgctggtgatgcttcgattctgtccctcgttagaatcagagtggacgtccctttgccttccatccaggggttatctttggaatgctcgagtgctcattgctgtgaacttataaaatgcccttgggtgttcatctttcttttgcacttttaaataatatcttaagctcctttacaattaaagaattagcacagtgaaaccatacacagagagaaacattggttattgtcctcagtgtttttcgctgatacttattttgatgaaagtgataccacgttatatagctgtttctctgtcgctcctttttgttactcacagcccatcctgggcatctctccaggttagcaggtggggtttggagttgtttttgttacaattggtattcctggcttgattccattacctggtgttggacattgggttcttttatgcttcttgccaccacaagcagtgctgtagtgggcatctctgccaggtgttctttttgagaacccttgtcaccatgtgtgaaggaaggagtaattttgaggagccctggtgtcagcaggagaacctggagggagatgaagtgtggggacggtcagttctagctgtgagcactgtcctcactctggaactcatcagtggcgccgatggatactggctcatagtgcttctgaagatcaggtctggatatctcactctcctgagatgccagtatagacacagaaccaaagcaaagtgtttactaagtaaaaaaataaaataaaaaaacacttctatttcttataaaaaa

SEQ ID NO: 250 - DNA, 9390 bp, Homo sapiens
ggcaatttcttttcctttctaactgtggcccgcgttgtgctgttgctgggcaggcgttgggcgccggcggtcttcgagcgtgggggcccgctggctttcccttctcagaaactgcgccgggggcgctcgcttgccccggattcggacgcggcgctccccgggctcgtctgaagtgcagatcgccgcagaggccccagtgcccggatgtccatcaggattagcgcgagccaatacgggccgagcccggggctgcgccgaggacgcccggggctcgagagcaggtagtcccgtaacatcggggcgccgcgccgggacgcgtccccgcccggctccgccaaatggtgagcgcggcgctggcagcagggcccgcggggtgaaggcgctcatggacggaagacccctggctctataagctgaattatggcagcccagtcaagtttgtacaatgacgacagaaacctgcttcgaattagagagaaggaaagacgcaaccaggaagcccaccaagagaaagaggcatttcctgaaaagattcccctttttggagagccctacaagacagcaaaaggtgatgagctgtctagtcgaatacagaacatgttgggaaactacgaagaagtgaaggagttccttagtactaagtctcacactcatcgcctggatgcttctgaaaataggttgggaaagccgaaatatcctttaattcctgacaaagggagcagcattccatccagctccttccacactagtgtccaccaccagtccattcacactcctgcgtctggaccactttctgttggcaacattagccacaatccaaagatggcgcagccaagaactgaaccaatgccaagtctccatgccaaaagctgcggcccaccggacagccagcacctgacccaggatcgccttggtcaggaggggttcggctctagtcatcacaagaaaggtgaccgaagagctgacggagaccactgtgcttcggtgacagattcggctccagagagggagctttctcccttaatctctttgccttccccagttccccctttgtcacctatacattccaaccagcaaactcttccccggacgcaaggaagcagcaaggttcatggcagcagcaataacagtaaaggctattgcccagccaaatctcccaaggacctagcagtgaaagtccatgataaagagacccctcaagacagtttggtggcccctgcccagccgccttctcagacatttccacctccctccctcccctcaaaaagtgttgcaatgcagcagaagcccacggcttatgtccggcccatggatggtcaagatcaggcccctagtgaatcccctgaactgaaaccactgccggaggactatcgacagcagacctttgaaaaaacagacttgaaagtgcctgccaaagccaagctcaccaaactgaagatgccttctcagtcagttgagcagacctactccaatgaagtccattgtgttgaagagattctgaaggaaatgacccattcatggccgcctcctttgacagcaatacatacgcctagtacagctgagccatccaagtttcctttccctacaaaggactctcagcatgtcagttctgtaacccaaaaccaaaaacaatatgatacatcttcaaaaactcactcaaattctcagcaaggaacgtcatccatgctcgaagacgaccttcagctcagtgacagtgaggacagtgacagtgaacaaaccccagagaagcctccctcctcatctgcacctccaagtgctccacagtcccttccagaaccagtggcatcagcacattccagcagtgcagagtcagaaagcaccagtgactcagacagttcctcagactcagagagcgagagcagttcaagtgacagcgaagaaaatgagcccctagaaaccccagctccggagcctgagcctccaacaacaaacaaatggcagctggacaactggctgaccaaagtcagccagccagctgcgccaccagagggccccaggagcacagagcccccacggcggcacccagagagtaagggcagcagcgacagtgccacgagtcaggagcattctgaatccaaagatcctccccctaaaagctccagcaaagccccccgggccccacccgaagccccccaccccggaaagaggagctgtcagaagtctccggcacagcaggagcccccacaaaggcaaaccgttggaaccaaacaacccaaaaaacctgtcaaggcctctgcccgggcaggttcacggaccagcctgcagggggaaagggagccagggcttcttccctatggctcccgagaccagacttccaaagacaagcccaaggtgaagacgaaaggacggccccgggccgcagcaagcaacgaacccaagccagcagtgcccccctccagtgagaagaagaagcacaagagctccctccctgccccctctaaggctctctcaggcccagaacccgcgaaggacaatgtggaggacaggacccctgagcactttgctcttgttcccctgactgagagccagggcccaccccacagtggcagcggcagcaggactagtggctgccgccaagccgtggtggtccaggaggacagccgcaaagacagactcccattgcctttgagagacaccaagctgctctcaccgctcagggacactcctcccccacaaagcttgatggtgaagatcaccctagacctgctctctcggataccccagcctcccgggaaggggagccgccagaggaaagcagaagataaacagccgcccgcagggaagaagcacagctctgagaagaggagctcagacagctcaagcaagttggccaaaaagagaaagggtgaagcagaaagagactgtgataacaagaaaatcagactggagaaggaaatcaaatcacagtcatcttcatcttcatcctcccacaaagaatcttctaaaacaaagccctccaggccctcctcacagtcctcaaagaaggaaatgctccccccgccacccgtgtcctcgtcctcccagaagccagccaagcctgcacttaagaggtcaaggcgggaagcagacacctgtggccaggaccctcccaaaagtgccagcagtaccaagagcaaccacaaagactcttccattcccaagcagagaagagtagaggggaagggctccagaagctcctcggagcacaagggttcttccggagatactgcaaatccttttccagtgccttctttgccaaatggtaactctaaaccagggaagcctcaagtgaagtttgacaaacaacaagcagaccttcacatgagggaggcaaaaaagatgaagcagaaagcagagttaatgacggacagggttggaaaggcttttaagtacctggaagccgtcttgtccttcattgagtgcggaattgccacagagtctgaaagccagtcatccaagtcagcttactctgtctactcagaaactgtagatctcattaaattcataatgtcattaaaatccttctcagatgccacagcgccaacacaagagaaaatatttgctgttttatgcatgcgttgccagtccattttgaacatggcgatgtttcgttgtaaaaaagacatagcaataaagtattctcgtactcttaataaacacttcgagagttcttccaaagtcgcccaggcaccttctccatgcattgcaagcacaggcacaccatcccctctttccccaatgccttctcctgccagctccgtagggtcccagtcaagtgctggcagtgtggggagcagtggggtggctgccactatcagcaccccagtcaccatccagaatatgacatcttcctatgtcaccatcacatcccatgttcttaccgcctttgacctttgggaacaggccgaggccctcacgaggaagaataaagaattctttgctcggctcagcacaaatgtgtgcaccttggccctcaacagcagtttggtggacctggtgcactatacacgacagggttttcagcagctacaagaattaaccaaaacaccttaatggagccccaggttgattcaatgccttgggaactatttttgcacattggaagcctcaaaaacagtccagacgtttgtttcatcaggacaccaaactctaaaaaagaagcaccacgagatggccaggacatttgtccacttaaactctcaacaacagtgtgatcattggttggacactgtggttatgcagaagcagagatgaggaggctggccccagagatgatcttgcccttcctaactaaaggacagaagtgcaatttagcttaaatgggtgtatgaatggtctagaaacatttctattttttttttaaaccagcaggatacaagttgcaaatgaaatgaggagaaacagtttcaactctgaaagtgaatttcacgtcatctcagtagccacgctagtccattcccagaaggaaatttttttttttaacaatgacttttggtaaagggttttgtggatgattttttttcttttgagttttgggagaaatatttgtttaataacttctaatggccatctgtaaaccataagtaatgaaggactccactgtgccccactttctgccaatgaacagtggcttgataataccaagtattgttgtaatttataaaattgaaggcaacccccgctcctgccgcccccaatctccccattgcctagagcgctgcacattgaccccagctctgacttctcattactgtgctgaaagtcagcccacgtcggagcggtgaggaggagccacagcacatggggtgccacctcgaggtctgcacaggaggacttggcgctgccatttcctacccctgccatttcccacccctgcttcagcgaaagggactctctaacagggcagtcactgttgactctattctgaatttcctcccttggggaagaagggaaccaacatttatacctgaccagatggctaaagtgcttttaaagttttgtttaagtagagctggaatttgaggtgctgatctgtggtctacagttatgtggtaactcatgttgtccagccaactcagagtttcgtcagtgaacaagaaacatgaaatctgcttcttagagaggctatatttttctgctacaaatattttatatttatagcaaaactagactttcagagtccttgattgtctaggggaagttaactccctgagaggatgtagagatttggggtggttgattagacttttgaaaaactcatcaccacatgccttcactccagagtgttctcagctagatttgatttggttgaggaggaactgtggccctccgtaagttattgccatagtgtatgcattaaaccaagtccattttgaatgacctaaaatgaagtaacacaatcagaaatcccatgtgcccataagcacagatttttctttttcattgaaactttaaaggttattattggaaacattactttgagtgcagtgtttttaaaagccaattcttttttatcccttttagaagtagaatttgcacacttactacaattgaggagtgtcatctctataactttttctccgcctttgtcccattctgcccctggacatgtttcctaccaagcatgtttcacattttcctattagtggaggagggagaaccatatttatttataatgaagacatctaagatccctatgatgaatgcaggaactctcttggtagtttgtaaatacacaaagggatgtgtcgagggatgggagcgatgcttatctctcacagtgtgagtggtctgtgtgaggctgttccttcagttcttctccagactgttctttggttgtcacttaagtcagaggtctggtccctcatgtttaggtgaaagccagagaatgacagctgtagtcatatctgagcataagaccttgatgtgtgattcctgatgaccggtttcatttattcatgtaataaagcaaaggccctggtcctttttaaactactagttttaaaaacctgtgttaaatgaacagtaattgcctggtaggtttggtgtgtgtgtagcattgtgtgtccatctgttatatgtaaaggacaaggcaccagaatcaggctttatttcgatattgaagatgttatttaacatctttcttttttccttactcccttagccatcccctccccttttgtcctatcattccctagaacaagccacctgtcaattgtgaagggttgtgttctttatggcaggttctatgcagattgtgccagagcatgtgcgtgttctgttggcaagccacagtgctcccttgactgaagacatttccaggtagatttctcagccagctctaaaacagattgctttttcagtggccttactctttgtgggtttttttttttctctgaacttgatataaagattttatttgtcccttgaaaaagtaacaaatgtgcatagatcaatttgtactactttggtcattggatatttctgatccttattgcattgtacctaaaggagagtaactaatggtaacctttttaatagagtatgtgaaaggtagtggctgatgaatccttaacgttcatagggtctttttgctgttacggttgtatatagaggtctgaaggatttttaaaatgatttgcactttttcactgcatgcttacaattcccaaaggcaaaatctgtactgaggtagatcatttgaaagggctagattataaaattaagccttagagtatggaaagttcttataacaataatagtacacacttcagagtaagacaaatgcaaagcatcttaaggagtgaaaatagagtctaaatcttgcctttggcactacaaggtgtgtgtgtgtgtgtgtgttgtgtgtctttagtaggaaatggaagaacactgttttattttttaaagtgtttaatgtttctgtcctttctgtgaattattgaatttaagagccctgctaaataatgaaaaaacactttactaaaatttatcaaattatactgggttcggattgtgaaaacattggccacctagtagcagtggtgaggagtgggagggcccagcaagcatttatcagaaatagaatcacaataggaggagaatttggctgtctgatattatgatttgattacaatactgaatgggaaaagtatctaatattttgtaacaaaaagaccttcatattatctgttttgaccaaaatatgtagctatttcccttacacagattggaccgcacttatctcccttgtcctgtatcctttaatttcaggtctcaggatgtttagaaagctaaaaccccctacccctttctggctgaaaacttgccttatttggtatcttacacattaatgttactagcatcaggagcttactgttttattatgattcatcttcagtaatttttagaagcaagaagaaagccattgtgtcctctacaattaacaaaacttatctctgatatacaaagggatataaatatatacacttaaatagagaaaaagaggttgattgaattgtgcctttgagtgaacccagtttttaaataccgctgtgtttgtttcgccatggcttcagggatgctacatggctcttgcaccttttactcctctgctttatgaagtttgagttgtatttgtgcatcttaaagtaggttgaggcttgaggctgggctttcgggtttttttgttttttgttttgttttgttttgttttgttttcttgtacttaaacctgcttgcttcctaccacagattctttattttcccaaacactacaaaaaaacttttaaaactttgccatttcatctgtttacactctttgccactgattagcagtatttaaatcttgcaagaatattttgtgctttctttagaaacacaagagtatagatttttctcactgaaaagtgagagttacgcattgcagccatgaagggatgctaggatcaattatggcagtaccttttttcccctcctgttcttgagccagttgtctcttttgttttgggtcccacttaggattaacggatgtaaggtattttcctgtgcctttattttgtgtcattctattggaaggaggtgtaacggcagaatagcatcgtgttgggggttttccttcaaacactgcaagtgatattgccaccatgtgaacctcaaatatgcaatccagttgtgttggtttctcggtgacttggagtgttcatctcttcatgaattgtgagcactgaccatgttcttcagttcttaattatggtgagttgacaaataccaactactgcttttctttaggtggctataaatttcttactgtcaggaggaaatgacattatattctgttccactgaacgtcagagatcagcaggcactgtactgggtagagaagtgcctatacttctctacctaagagggcaggagggaaaccctacagctccttgtgagcctatatattagtatatcggcctggagaggacaagggaataagaccactcatagtgaggctggccaagctgcactggtcggaccaggcagtggctgacctaaggaaggcaacttgctttgcttaaaagtagattttttaagcaatgcttaacacaggcagcattcacctttgttcaggccatcgacatgtattgttaaaattactgcatatccccctcagatatcaagtatacactgttcatgttggggttgtgtgtgtgtatgtgtgtatgtacgcacgcatgtgtcccaaatcttgttttaattttttttttctgaatgtgatcatgttttggataatacctgagcagggttgccttttttttatttattaccattatatattatattatattatatattttttgctttcttataactttggaggaaagtcaaatcttggtattattaaaattgttttaaaaaggagtaaattttccagttgataaatgaaaatcactggcctatgtttaataagtttttctttaattactgtggaataacgtgccagctatcatcaacacaatgattttgtacatagggtagggaagcagtgatgctctcaatgggaagatgtgcaacacaaattaaggggaactccatgtattttacctacttcagcaatggaactgcaacttggggctttgtgaataaaatttagctgccttgtatagtcgtttgaaagaatatgtgatctgtgagagaattatagtttttttttagaagaaaaatctgcaaaagatctttccaaagacaatgtgccacagatcttttgttctctgtaatgaggattaattgctgtttaaacaaaaatgtaattgttcatctttaaattctttccttttcataagaggatcaagctgtaaaaaaacaaaaaaattaataaaaatttcgagaaatcaaaaaaaaaaa

SEQ ID NO: 251 - DNA, 4342 bp, Homo sapiens
gcgaaattcaagctccaaactctaagctccaagctccaagctccaagctccaagctccaaactcccgccggggtaactggaacccaatccgagggtcatggaggcatcccgaaggtttccggaagccgaggccttgagcccagagcaggctgctcattacctaagggtcttgctgtgtcgcccagactggaattcagtggcctgatcatagttcactgcagcctcgaactcctgggctcaagcagtcctcctgccccagcctccctagtagctgggacttaagatatgtgaaagaggccaaagaagcaactaagaatggagacctggaagaagcatttaaacttttcaatttggcaaaggacatttttcccaatgaaaaagtgctgagcagaatccaaaaaatacaggaagccttggaggagttggcagaacagggagatgatgaatttacagatgtgtgcaactctggcttgctactttatcgagaactgcacaaccaactctttgagcaccagaaggaaggcatagctttcctctatagcctgtatagggatggaagaaaaggtggtatattggctgatgatatgggattagggaagactgttcaaatcattgctttcctttccggtatgtttgatgcatcacttgtgaatcatgtgctgctgatcatgccaaccaatcttattaacacatgggtaaaagaattcatcaagtggactccaggaatgagagtcaaaacctttcatggtcctagcaaggatgaacggaccagaaacctcaatcggattcagcaaaggaatggtgttattatcactacataccaaatgttaatcaataactggcagcaactttcaagctttaggggccaagagtttgtgtgggactatgtcatcctcgatgaagcacataaaataaaaacctcatctactaagtcagcaatatgtgctcgtgctattcctgcaagtaatcgcctcctcctcacaggaaccccaatccagaataatttacaagaactatggtccctatttgattttgcttgtcaagggtccctgctgggaacattaaaaacttttaagatggagtatgaaaatcctattactagagcaagagagaaggatgctaccccaggagaaaaagccttgggatttaaaatatctgaaaacttaatggcaatcataaaaccctattttctcaggaggactaaagaagacgtacagaagaaaaagtcaagcaacccagaggccagacttaatgaaaagaatccagatgttgatgccatttgtgaaatgccttccctttccaggaaaaatgatttaattatttggatacgacttgtgcctttacaagaagaaatatacaggaaatttgtgtctttagatcatatcaaggagttgctaatggagacgcgctcacctttggctgagctaggtgtcttaaagaagctgtgtgatcatcctaggctgctgtctgcacgggcttgttgtttgctaaatcttgggacattctctgctcaagatggaaatgagggggaagattccccagatgtggaccatattgatcaagtaactgatgacacattgatggaagaatctggaaaaatgatattcctaatggacctacttaagaggctgcgagatgagggacatcaaactctggtgttttctcaatcgaggcaaattctaaacatcattgaacgcctcttaaagaataggcactttaagacattgcgaatcgatgggacagttactcatcttttggaacgagaaaaaagaattaacttattccagcaaaataaagattactctgtttttctgcttaccactcaagtaggtggtgtcggtttaacattaactgcagcaactagagtggtcatttttgaccctagctggaatcctgcaactgatgctcaagctgtggatagagtttaccgaattggacaaaaagagaatgttgtggtttataggctaatcacttgtgggactgtagaggaaaaaatatacagaagacaggttttcaaggactcattaataagacaaactactggtgaaaaaaagaaccctttccgatattttagtaaacaagaattaagagagctctttacaatcgaggatcttcagaactctgtaacccagctgcagcttcagtctttgcatgctgctcagaggaaatctgatataaaactagatgaacatattgcctacctgcagtctttggggatagctggaatctcagaccatgatttgatgtacacatgtgatctgtctgttaaagaagagcttgatgtggtagaagaatctcactatattcaacaaagggttcagaaagctcaattcctcgttgaattcgagtctcaaaataaagagttcctgatggaacaacaaagaactagaaatgagggggcctggctaagagaacctgtatttccttcttcaacaaagaagaaatgccctaaattgaataaaccacagcctcagccttcacctcttctaagtactcatcatactcaggaagaagatatcagttccaaaatggcaagtgtagtcattgatgatctgcccaaagagggtgagaaacaagatctctccagtataaaggtgaatgttaccaccttgcaagatggtaaaggtacaggtagtgctgactctatagctactttaccaaaggggtttggaagtgtagaagaactttgtactaactcttcattgggaatggaaaaaagctttgcaactaaaaatgaagctgtacaaaaagagacattacaagaggggcctaagcaagaggcactgcaagaggatcctctggaaagttttaattatgtacttagcaaatcaaccaaagctgatattgggccaaatttagatcaactaaaggatgatgagattttacgtcattgcaatccttggcccattatttccataacaaatgaaagtcaaaatgcagaatcaaatgtatccattattgaaatagctgatgacctttcagcatcccatagtgcactgcaggatgctcaagcaagtgaggccaagttggaagaggaaccttcagcatcttcaccacagtatgcatgtgatttcaatcttttcttggaagactcagcagacaacagacaaaatttttccagtcagtctttagagcatgttgagaaagaaaatagcttgtgtggctctgcacctaattccagagcagggtttgtgcatagcaaaacatgtctcagttgggagttttctgagaaagacgatgaaccagaagaagtagtagttaaagcaaaaatcagaagtaaagctagaaggattgtttcagatggcgaagatgaagatgattcttttaaagatacctcaagcataaatccattcaacacatctctctttcaattctcatctgtgaaacaatttgatgcttcaactcccaaaaatgacatcagtccaccaggaaggttcttttcatctcaaatacccagtagtgtaaataagtctatgaactctagaagatctctggcttctaggaggtctcttattaatatggttttagaccacgtggaggacatggaggaaagacttgacgacagcagtgaagcaaagggtcctgaagattatccagaagaaggggtggaggaaagcagtggcgaagcctccaagtatacagaagaggatccttccggagaaacactgtcttcagaaaacaagtccagctggttaatgacgtctaagcctagtgctctagctcaagagacctctcttggtgcccctgagcctttgtctggtgaacagttggttggttctccccaggataaggcggcagaggctacaaatgactatgagactcttgtaaagcgtggaaaagaactaaaagagtgtggaaaaatccaggaggccctaaactgcttagttaaagcgcttgacataaaaagtgcagatcctgaagttatgctcttgactttaagtttgtataagcaacttaataacaattgagaatgtaacctgtttattgtattttaaagtgaaactgaatatgagggaatttttgttcccataattggattctttgggaacatgaagcattcaggcttaaggcaagaaagatctcaaaaagcaacttctgccctgcaacgccccccactccatagtctggtattctgagcactagcttaatatttcttcacttgaatattcttatattttaggcatattctataaatttaactgtgttgtttcttggaaagttttgtaaaattattctggtcattcttaattttactctgaaagtgatcatctttgtatataacagttcagataagaaaattaaagttacttttctcaagtgttttcaaaaaaaaaaaaaaaaa

SEQ ID NO: 252 - DNA, 11141 bp, Homo sapiens
tgcagcgctggtcgcagccctcagctgcgccgggcggttccggctcctccctctccttgtgcctcagcgccaccatggtgctggagtcggtggtcgcggacttgctgaaccgcttcctgggggactatgtggagaacctgaacaagtcccagctgaagctgggcatctggggcggaaatgtggctttagataatctacagataaaagaaaatgccctgagtgaattggatgttccttttaaagtcaaggctggccaaattgataaattaactttgaagattccttggaagaacctttatggagaagcagttgttgcgaccctggaaggattatacctgcttgttgtccctggagcaagtattaagtatgatgctgtaaaagaagaaaaatccttgcaggatgttaaacagaaagagctatcccgaattgaagaagcccttcaaaaagcagcagaaaaaggcacacattcaggggagttcatatatggcttggagaactttgtttacaaggacatcaagcctggacgtaaacgtaaaaagcacaaaaaacattttaagaaaccttttaaaggtcttgatcgttcaaaagataagccaaaagaagccaaaaaggatacatttgtggaaaaattggcaactcaagtaataaaaaatgtacaagtaaaaatcacagatattcacattaaatatgaagatgatgtcactgatccaaagcggcctctttcatttggtgtcacactgggagagcttagtctactgactgcaaatgaacactggactccatgcatattaaatgaagcagacaaaattatatacaagcttatacgacttgatagtcttagcgcctactggaatgtaaattgcagcatgtcttaccagagatcaagggaacagattttggatcagctgaaaaatgaaattcttacaagtggaaatatacccccaaattatcaatacattttccagccaatatcagcctctgcaaaactctacatgaatccttatgcagaatcagagctcaaaacgcccaaactggattgcaacatagaaatacaaaatattgccattgaactgaccaaacctcagtacttaagtatgattgaccttttggagtcagtggattatatggttaggaatgcgccttataggaaatacaagccttatttaccacttcataccaatggtcgacgatggtggaaatatgcaattgattctgttcttgaagttcatataagaaggtatacacagatgtggtcatggagtaacataaaaaagcacaggcagttactcaagagttataaaattgcctacaaaaacaagttaacacagtctaaagtctcagaagaaatacagaaagaaattcaggacttggagaagactctagatgtttttaacataattttagcaaggcaacaagcacaagttgaggtgattcggtctgggcaaaaattaaggaaaaagtctgctgacacaggcgagaaacgtggaggctggtttagtgggttgtggggtaagaaagagtctaagaaaaaggacgaagaatcattgattcctgaaactattgatgaccttatgactccagaggaaaaagataaactcttcactgccattggttatagtgagagtacccacaacctaactttacctaagcagtatgttgcccatattatgaccctgaagttagtaagcacctctgttacgataagagaaaacaagaatattccagaaatactaaaaattcagataattggcctgggcactcaagtatctcagcgaccaggagcacaagcacttaaggtagaagcgaaattagaacactggtatataacaggtttgagacagcaggatattgtgccatcacttgtggcttcaattggtgacactacatcatccttgcttaaaattaaatttgaaaccaatccggaggatagtcctgctgaccagactctgattgttcagtcccagcctgtggaggtcatctatgatgctaaaactgtcaatgcagtggttgaattctttcaatcaaataagggattggatcttgagcaaataacatcagcaacattgatgaagctggaagaaattaaggagagaacagctacaggacttacacatattattgaaactcgaaaagtccttgatttaaggataaatctgaagccttcttatctagtagttccacagacgggtttccaccatgaaaagtcagatcttctgattttagattttggtacatttcagctcaacagtaaagatcaaggtttacagaagactactaattcatctctggaagaaataatggataaggcatatgacaagtttgatgttgaaataaaaaatgtacaactactttttgcaagagcagaggaaacctggaaaaagtgtcgatttcagcatccatcaactatgcatatattgcaacccatggatattcatgttgagttggctaaggccatggtagaaaaagacattagaatggccagatttaaagtgtcaggaggacttcctttgatgcatgtgagaatttctgaccagaagatgaaagatgtgctatatttgatgaacagtatacctttgccacagaaatcatcagcccagtctccagagagacaggtatcctcaattcctattatttcaggtggtacaaaaggtctacttggtacttcactattgctagacactgtggaatcagagtctgatgatgagtattttgatgctgaagatggagaaccacagacttgtaaaagtatgaaaggatcagaacttaaaaaagctgcagaggtcccaaatgaggagctcatcaatcttctactcaagtttgaaattaaagaagtgattttggaatttactaaacagcagaaagaagaagatacaattctagtatttaatgttactcagttaggaacagaggccacaatgagaacatttgacttaactgtggtatcttatttaaagaaaatcagcttggattatcatgaaattgaaggatccaaaaggaagccccttcacttgattagctcttctgacaaacctggattagatcttttgaaagtggagtatattaaggctgataagaatggacctagttttcaaactgcttttggaaaaactgaacaaacagttaaggtggccttttcatctttaaatctgttgctgcaaacacaagctcttgtcgcttctattaattacctcacaaccattattccatctgatgatcaaagcataagtgttgctaaggaggtacaaatttcaactgaaaaacaacaaaaaaattcaactctgccaaaagcgattgtatcctccagagatagtgacattattgatttcaggctatttgccaagttgaatgctttctgtgtcattgtttgcaacgaaaagaacaatatcgccgaaatcaagattcaaggactggattcctccctttctctccagtcaagaaagcagtcactttttgcccgactagaaaatattattgtcacagatgttgatccaaagacagttcataagaaagctgtgtcaataatgggaaatgaagttttccgttttaatttggatttgtatccagatgctactgagggggatttgtatactgacatgtccaaagtggatggtgtgctgtctctgaatgttggctgtattcagattgtctatcttcataaattccttatgtcacttctgaacttcctgaataatttccagacagccaaagagtctctgagtgctgccactgcccaggctgcagaaagggctgccacaagtgtgaaagatcttgcccagaggagttttcgtgtttccatcaatattgatttgaaagcaccggttatagtcatcccacagtcttctatttccaccaatgcagtagtggtagatcttgggttaatcagagttcataatcagttcagtctggtgtctgatgaagactacttaaatcctccagtaattgatagaatggatgtgcagctaacaaagcttacactttataggacagtgatccagccaggcatctaccatcctgatattcagctgttgcacccaattaacttggaatttcttgtaaatcggaatctagctgcatcttggtaccacaaggtgcctgttgtggaaattaaaggacatcttgattcaatgaatgttagtctaaatcaagaagatcttaatcttttatttaggatactaacagaaaatctctgtgagggtactgaagacttggataaagtgaaaccaagagtacaagagacaggtgaaattaaagagccccttgaaatctctatatcacaagatgtacatgattcaaaaaatactttaacaactggagtggaagaaattaggtctgtagacatcattaatatgctgctgaattttgaaattaaagaggttgtggttactttgatgaaaaaatcagaaaagaaaggaaggcctttacatgagctaaatgtcctgcaacttggaatggaagctaaagttaaaacctatgacatgactgctaaagcttatctaaaaaaaattagtatgcagtgctttgatttcactgactctaaaggggaacctcttcacattattaactcttctaatgtgactgacgaaccccttctgaaaatgttactgacaaaggcagacagtgatggaccagaatttaaaactattcatgacagtaccaaacagagactgaaggtttcatttgcatccttagacttagtacttcatttggaagctttactttccttcatggattttttatcatctgctgctccattctctgagccttcctcttctgagaaggaatccgagctgaaaccacttgtgggggagtccagaagtatcgctgtcaaagctgtatccagcaacatttcccaaaaggatgtgtttgatttaaagatcacagctgaattaaatgcatttaatgtctttgtctgtgatcagaagtgtaacattgcagatattaaaatacatggaatggatgcctctatttctgtgaagcctaagcagactgatgtgtttgccagacttaaagatattatagttatgaatgtagatttgcagtccattcacaaaaaggctgtctctattttgggagatgaagtctttaggttccaactgactctttatccagatgccacagaaggagaggcctatgctgatatgtccaaagtagacggcaaacttagttttaaagtgggttgtattcagattgtttatgttcataaattcttcatgtctcttttgaacttcctcaacaatttccaaactgctaaagaagctttgagtacagccacagtccaggctgcagaaagagctgcttccagcatgaaagacttggctcaaaagagtttccgccttttgatggatattaatttgaaagcaccagttattattattcctcagtcttcagtatcacctaatgctgttatagcagatctgggtttaatcagagttgaaaacaagtttagcttggttcctatggaacattattctcttcctccagtcattgataaaatgaacatcgaactcactcagttgaagctgtcaagaactattttgcaggctagcttgccacaaaatgacattgaaattttaaaaccagtcaacatgcttttgtccatacagcgaaacttagcagcagcatggtatgtgcaaattccagggatggagataaaaggaaaactaaaacctatgcaggttgctctcagtgaagatgacttgacagttttaatgaaaattttgctagaaaatcttggagaagcttcctcacaaccaagccctacacagtctgtgcaggagactgtaagagtgagaaaagttgatgtttcaagtgtacctgaccatctcaaagaacaagaagattggacagactcaaagctctctatgaaccagattgtcagtctccaatttgactttcactttgaatctctttccattatcctttataacaatgatatcaaccaggaatctggagttgcatttcataatgacagtttccaacttggtgaactcagactacatcttatggcctcctcagggaagatgtttaaggatggctcaatgaatgtcagcgttaaacttaagacatgcacccttgatgatctcagagaaggaattgagagagcaacatcgagaatgattgacagaaagaatgaccaagataacaacagttctatgattgatataagttacaaacaagacaaaaatggaagtcaaattgatgctgttcttgacaagctgtatgtatgtgccagtgtggaatttctgatgactgtggcagatttctttatcaaagctgtgcctcagagtccagaaaatgtggcaaaagaaacacagattttaccaagacagactgccacagggaaggtcaagatagagaaagatgactctgttagaccaaatatgactttaaaggccatgatcacagatccagaagtggtatttgttgccagcctgacaaaggctgatgctcctgctctgacagcctcgtttcagtgcaacctttctctgtcaacatccaaactcgaacagatgatggaagcttctgtgagagatctgaaagtgctcgcttgcccttttctcagagaaaagagagggaaaaacattaccacagtcttgcagccctgttctttatttatggaaaaatgtacgtgggcttcaggaaagcaaaatataaatattatggttaaagaatttataattaagatttcacccataattcttaatactgtgttgacaatcatggctgcattgtctccaaaaacaaaagaagatggatccaaagatacgtctaaggaaatggaaaatctttggggtatcaaatcgattaatgattataacacttggtttcttggtgttgacacggcaacagaaataacggaaagcttcaaaggcattgaacattcactgatagaggaaaattgtggtgttgttgtagaatccattcaagttaccttagaatgtggccttggacatcgaactgtacctttattattggcagagtctaagttttcaggaaatattaaaaattggacttctctaatggctgctgttgctgacgtgacactacaggtgcactattacaatgagatccatgctgtctgggagccactgattgagagagtggaggggaagagacaatggaatttaaggcttgatgtaaagaagaacccagttcaggataaaagtttgctgccaggagatgattttattcctgagccacaaatggcaattcatatttcttcaggaaatacaatgaatataacaatatccaaaagttgtcttaatgttttcaacaatttagcaaaaggtttttcagagggcactgcttctacttttgactactctttaaaggacagagctccttttacggtaaaaaatgctgtaggtgttcccattaaggtgaagcccaattgtaatctcagagtaatgggcttccctgagaaaagtgatatttttgatgttgatgctggccagaatttggaactggagtatgccagcatggtaccttcaagtcaagggaacctatctatattgagccgtcaagaaagctccttcttcactctgaccattgtacctcatggatatacagaagttgcaaatatccctgtggccagacctggacggcgattgtataatgtacggaatcccaatgccagtcattctgactctgtcttggtacaaattgatgcaactgaagggaataaagtaattacccttcgctctcctctacagatcaaaaaccatttctccattgcatttatcatctataaatttgttaagaatgttaagctattggagcgcattgggatagccagacctgaagaggagttccatgttcctttagattcatatagatgtcaattgtttatccagccagctggaatcttagagcatcagtacaaagaatctaccacttatatttcctggaaggaagaacttcataggagcagggaagtcagatgcatgttgcagtgtccatcagtagaagtcagcttcttacctctcatagtgaatacagttgctctgcctgatgaattgagctacatatgtacacatggggaagactgggatgtagcttacattattcatctttatccttctctcactttgcggaatcttctcccatattccctaagatatttacttgagggaacagcagaaactcatgagctggcagaaggcagtactgctgatgttctgcattcgagaatcagtggtgaaataatggaattagtcctggtgaaataccagggcaaaaactggaatggacatttccgcatacgtgatacactaccagaattctttcctgtgtgtttttcttctgactccacagaagtgacgacagtcgacctgtcagtccacgtcaggagaattggcagccggatggtgctgtctgtctttagtccctattggttaatcaacaagactacccgggttctccagtatcgttcagaagatattcatgtgaaacatccagctgatttcagggatattattttattttctttcaagaagaagaacatttttactaaaaataaggtacaattaaaaatttcaaccagtgcctggtccagtagtttctcattggatacagtgggaagttatgggtgtgtgaagtgtcctgccaacaatatggagtacctggttggtgttagcatcaaaatgagcagtttcaacctttcacgaatagttaccctgactcccttttgtaccattgcaaacaagtcatcattagaactagaagttggcgagattgcatctgatggctcaatgccaactaataaatggaactatattgcttcttcagagtgccttccattttggccagaaagtttgtcaggcaaactttgtgtgagagtggtgggctgtgaaggatcttccaaaccattcttttataaccgacaggataatggcactttattgagcttagaagatctgaatgggggtatcttggtggatgtaaacactgccgaacattcaactgtcataactttttctgattaccatgagggatctgcacctgccttgataatgaaccatacaccatgggacatcctcacatacaaacagagtgggtcaccagaagaaatggtcttgctgccaagacaggctcgactttttgcctgggcagatcctactggtaccagaaaacttacatggacatatgcagcaaatgttggggaacatgatctgttaaaggatggatgtggacagtttccatatgatgcaaacatccagatacactgggtatcatttctggatgggcgccagagagttttgcttttcaccgatgatgttgccttggtttccaaagcactgcaggcagaagaaatggaacaggctgattatgaaataaccttgtctctccacagtcttgggctttcactggttaacaatgaaagcaagcaggaagtttcctatattgggataaccagttctggtgttgtttgggaggtgaaaccaaagcagaaatggaagccatttagtcaaaagcagataatcttattggaacaatcctatcagaaacatcaaatatcaagagaccatggctggattaagctagataataattttgaggtcaattttgataaagatccaatggaaatgcgcctccctattcgtagccctattaaacgagactttttatcaggaattcagattgaatttaagcagtcttctcaccagagaagtttaagggccaggttgtactggcttcaggttgataatcagttaccaggtgcaatgttccctgttgtatttcatcctgttgcccctccaaaatctattgctttagattcagagcccaagcctttcattgatgtgagtgtcatcacaagatttaatgagtacagtaaagtcttacagttcaagtattttatggtcctcattcaggaaatggccttaaaaattgatcaagggtttctaggagctattattgcactgtttaccccaacaacagaccctgaagctgaaagaagacggacaaagttaatccaacaagatattgatgctctaaatgcagaattaatggagacttcaatgactgatatgtcaattcttagtttctttgaacatttccatatttctcctgtgaagttgcatttgagtttgtctttgggttccggaggtgaagaatcagacaaagaaaaacaggaaatgtttgcagttcattctgtcaacttgctgttgaaaagcataggtgctactctgactgatgtggatgaccttatattcaaacttgcttattatgaaattcgatatcagttctacaagagagatcagcttatatggagtgttgttaggcattacagtgaacagttcttgaaacagatgtatgtccttgtattggggttagatgtacttggaaacccatttggattaattagaggtctgtctgaaggagttgaagctttattctatgaacccttccagggtgctgttcaaggccctgaagaatttgcagaggggttagtgattggagtgagaagcctctttggacacacagtaggtggtgcagcaggagttgtatctcgaatcaccggttctgttgggaaaggtttggcagcaattacaatggacaaggaatatcagcaaaaaagaagagaagagttgagtcgacagcccagagattttggagacagcctggccagaggaggaaagggctttctgcgaggagttgttggtggagtgactggaataataacaaaacctgtggaaggtgccaaaaaggaaggagctgctggattctttaaaggaattggaaaagggcttgtgggtgctgtggcccgtccaactggtggaatcgtagatatggccagtagtaccttccaaggcattcagagggcagcagaatcaactgaggaagtatctagcctccgtccccctcgcctgatccatgaagatggcatcattcgtccttatgacagacaggaatctgagggctctgacttacttgagcaagaactggaaatacaggaataaatgtttcctaaactactacttgatttcatccttaaaaatcaaaacaaactgtggtgttaattgactgtgtgtgaattccattgtcaattttaatgaaattttctttaaaactctcacctccatctgaacttttcatagtagtgggattgactacaaataaaaacttgtggtattcctggt

SEQ ID NO: 253 - DNA, 2166 bp, Homo sapiens; identical to SEQ ID NO: 154

SEQ ID NO: 254 - DNA, 16079 bp, Homo sapiens
tattctcacaccagagccgtgaccgagacccagaggtccgcttccggccacggccgaacagctgcaccgtgcgtaccgggaacggtcaaggcgcagctggaaccgctgcaaaaggcctccgggcgtaccggacaggtcgcaagggcgggggtccccacctagcggaaatgcacggaggccaacccctccccctgcccccgcgaggagcggggcggactcggcagccgccactccccaggctcacaggaagaaactgggacgctgcggacgcggaactggccagacccgcggcgcgtggcacgcgcgagccctcccgcgcatgctccacccgccggcctccagcccgcgccccgggccccgcctccctccctgcttctccccctctcccgtcagcctccctccgagtttggcccctccggccgggcgatcgacgttccgcgtgcgtgcgggcgcctgacttcacttccggctaacgcgctcggcttgccccctggccccggatggtgactggtggtggtgctgcacctcccgggactgtcactgagccgcttcccagtgtgattgtgctgagcgcaggccggaagatggcggctgcggctgcggcggcctcgggccccggctgctcctcggcggcgggggcgggggcggccggggtctcagagtggctggtgctgcgggacggctgcatgcactgcgacgccgacgggctgcacagcctgtcctaccaccctgcgctcaacgccatcctggccgtcactagccgcgggaccatcaaagtcatcgacggcacctcgggggccacactgcaggcctccgcgctcagtgctaaaccaggtggacaggtgaaatgtcagtatatctctgctgtggataaagttatatttgtggatgattatgcagtagggtgtaggaaggaccttaatggaatcttgttgttagacactgctctgcaaactccagtttcaaagcaggatgatgtggttcagcttgaattacccgttacagaggcacagcagctcttatcagcatgtttagaaaaggtagatatttctagtacagagggttatgatttgttcatcacacagctcaaagatggtttaaaaaatacatctcatgagactgcagcaaaccacaaagttgctaagtgggccacagttacatttcatcttcctcatcatgtgttgaagtccattgccagtgccattgtaaatgaactcaagaaaataaatcaaaatgttgctgccttacctgtggcgtcctcagtgatggacagattgtcttacctcttacctagtgcacgtccagaactcggagtggggccaggccgttctgtagacagatcactgatgtatagtgaagctaacagacgggagacatttacctcatggcctcatgtaggctataggtgggcacaaccagatcccatggctcaagctggattttatcatcagcctgcctcatctggagatgatagagccatgtgttttacttgtagtgtatgcctcgtttgttgggaacctactgatgaaccttggtctgaacacgaaagacattccccaaactgcccatttgtgaaaggtgagcacacacagaatgtgccattgtcagtcactcttgcaacaagtcctgcacagtttccttgtacggatggaactgacagaatatcttgctttgggtcggggagctgccctcattttctagctgctgcaactaaacgaggaaagatctgcatatgggatgtttccaaacttatgaaggtgcacttaaagtttgaaattaatgcctatgatccagcaattgtacaacagcttattctatcaggagacccaagctcaggagttgattcaaggagaccaactttggcgtggctggaggactcctctagttgctcagatataccaaaattggaaggagatagtgatgatttactggaggattcagacagtgaagagcattccagatcagattctgtgacagggcatacatcacagaaggaagccatggaagtaagccttgatataacagcactcagcattctccaacagccagaaaaacttcagtgggagattgttgcaaatgtgcttgaagatactgttaaggatcttgaagaacttggggcaaatccttgtttaacaaactctaagagtgaaaagacaaaggaaaagcaccaggagcaacacaacattccttttccatgtttattagctggaggtttattaacatataaatctcctgctacctcacccattagtagtaattctcacaggtcactggatggtttaagcagaactcagggtgaaagtatatcagaacaagggtcaactgacaatgaatcctgcactaattcagaactaaattctcctctggtaaggaggactttaccggttttgcttctttatagcatcaaggaatctgatgagaaagcaggaaagatcttttcacagatgaacaatattatgagtaaaagtttgcatgatgatggttttactgttccacagattattgaaatggagctggatagtcaggagcagttgttattgcaggatcctcctgtgacttacattcagcaatttgcagatgcagcagccaaccttacctctccggattctgagaagtggaactctgtgtttcccaagcctgggactttggttcagtgcttgaggctgccaaagtttgcagaggaggagaatctttgtatagactcaataactccttgtgctgacggaattcatttgttggtaggactgcggacatgccctgttgaatccttgagtgcaataaatcaagtagaggccttgaataatttaaataaattaaactctgcactatgtaatagacggaaaggtgagctggaatcaaatcttgctgtagtgaatggtgcaaatattagtgtaatccaacatgaatcaccagcagatgtacagactcctttaataattcagcctgagcagaggaatgttagtggtggatatttagtgctttataaaatgaattatgccactcggatagtgactttagaagaggagccaataaaaatacaacatatcaaagatccccaggacacaattacctcgctcattttgcttccacccgatatattggataatcgagaggatgactgtgaggaacctattgaggacatgcagttaacctcaaagaatggttttgagagagaaaaaacgtctgacatttctactcttggacacctggtaataaccactcagggaggatatgtaaaaatactagatctttcaaactttgaaattttggccaaagtggagcctcccaaaaaggagggcactgaggaacaggacacatttgtttctgtgatttactgttctggcacagacaggctgtgtgcatgcaccaaaggtggtgagcttcattttctccaaattggaggaacctgtgatgatattgatgaagctgatatactagtggatggatctctttctaaaggaatagaaccatcttcagaaggttccaaacctttatcaaatccttcaagtcctggcatttcaggagttgatttattggtggaccagccattcacccttgaaatcttgacatccctagtggagctaacccgctttgagactttgactccaaggttttcagcgactgttcctccatgctgggtagaagttcaacaagaacagcagcaaaggaggcatcctcaacatttgcatcagcaacaccatggtgatgctgctcagcatactcgaacttggaaactacagaccgacagcaacagctgggatgaacatgtatttgaattagtactacctaaagcttgtatggttggacatgtggacttcaaattcgttttgaactcaaacatcaccaatattccacagatacaagtgacactgctgaaaaataaagctccaggattagggaaagtcaatgctcttaacattgaagtggaacaaaatgggaaaccgtccctggttgatttgaatgaagaaatgcagcacatggatgtagaggaatcacagtgtcttagattatgtccatttttggaggatcataaagaagacattctatgtgggccagtatggcttgctagtggccttgatctatcagggcatgctggaatgttgacgttaacaagccccaaacttgttaaaggtatggcaggaggaaaatatcgttcgtttttaatccatgtcaaggcagtgaatgaaagaggaacagaagagatttgtaatggtggtatgcgtcctgtagtaaggcttccatccctaaaacaccagagtaacaagggttattcacttgcttcacttttggctaaagttgcagcaggcaaggaaaaatcatctaatgttaagaatgaaaatacaagtggcacccgtaaatctgaaaacctccggggctgtgatttacttcaagaggtctcagtcaccattcgaagatttaagaaaacctcaatttctaaggaaagagtgcaacgatgtgccatgttacagttttcagaatttcatgagaagcttcttaatactctttgcagaaaaacagatgatggccagatcacagaacatgcccagagccttgtgttggatactctctgttggttagctggagttcattcaaatggacccggaagctcaaaggaaggaaatgagaacctactttcaaaaacacgaaaatttctgtcagacatcgtacgtgtttgcttctttgaggcaggacgaagtatagcccataagtgtgcccgatttctagccttgtgcattagtaatggcaaatgtgacccatgtcaaccagcatttggacctgttctgttgaaggctttacttgataatatgtcatttttacctgcagcaacaactggtggttctgtctattggtattttgtcttactgaattatgtgaaagatgaagatctggctggatgcagtacagcttgtgcatctttgcttactgcagtgtccagacagttacaggacaggctaacaccaatggaggctttacttcagacaagatatggattatatagctcaccatttgatccagtcctctttgatttggagatgagtggctcttcttgtaaaaatgtttataacagcagcattggtgtccagtcagatgaaattgatttatcagatgtcctttcaggaaatggaaaggtcagtagttgcacagctgctgagggtagtttcacatctctcactggacttttggaagttgaacctctgcactttacttgtgtgtcaactagtgatggaaccagaatagaaagggatgatgcaatgagttccttcggggttactcctgcagtaggtggactatcatctgggacagttggggaagcctcgacagccctgagttcagcagcccaggtagctttgcagtctctctctcatgcaatggcttcagccgagcaacagctacaggtgctgcaagagaaacagcagcagcttttgaagcttcagcaacagaaagcaaagctggaagccaagttacatcagacaacagctgcagcagctgcagcagcatcagcagtaggtcctgttcacaactctgtgccttccaacccagtggctgcccctggattcttcattcatccatctgatgttattccacccactccaaaaacaacacctctttttatgactccaccactcactccacccaatgaagcagtttccgttgtgattaatgccgaacttgcacagcttttcccaggctcagtcattgatcccccagcagtcaatcttgctgcacataacaaaaattccaacaagtccagaatgaatccacttggttctggtctagcccttgcaatttctcatgcttcacattttcttcaacctccgcctcaccagtccattattatagagcgaatgcattcaggagcaagaagatttgtgaccttggattttgggaggcctatattgttgactgatgtattgattcccacttgtggagacttggcctctttgtcaattgacatttggacattaggagaagaggtggatggaaggcggttggtagtggcaactgatataagcactcattcactaattcttcatgacttaataccacctcccgtgtgcagattcatgaagatcactgttattggacgttacgggagtacaaatgccagagccaaaatcccattaggattttactatggtcatacctacatcttgccttgggaaagtgaactgaagttaatgcatgatcctctaaagggagagggagaatctgcaaaccagccagaaattgaccagcatttagcaatgatggttgctttgcaggaggatatacagtgcaggtataacttggcttgtcatcgtctggaaacccttttgcaaagtattgatcttcctcctctaaacagtgctaacaatgcacagtactttttacgaaaaccagataaggcagttgaggaagacagtagggttttttctgcttatcaagattgtattcagctacagcttcaactaaatttggctcataatgcagtgcagaggctcaaagtggcgctaggtgcaagccggaagatgttgagtgaaacatcaaatccagaagatttaattcagacatcttccacagagcagttacgtactatcatcagatatttactggacactttgctcagcctgcttcatgcttctaatggacactctgttcctgcagttttgcagagcacatttcatgcccaggcctgtgaagagctctttaaacacttgtgcatcagtggaaccccaaagatacggttacatactggtcttcttcttgttcaactgtgtggtggtgaaaggtggtggggtcaatttctttctaatgtccttcaggaattgtacaattcggaacagcttctcatctttccacaggatagggtcttcatgttactttcctgcattggtcaaagatcacttagtaatagtggagtattagaaagcttacttaatctcttggataatttattgtcacctcttcagccacagttacccatgcataggaggacagaaggagtactagatattcccatgatcagttgggttgttatgctggtgtccaggttgctggattatgtggcaactgttgaagatgaagcagcagctgcaaagaaacctttgaatggtaatcagtggagttttattaacaataatctacacactcagagcttaaatagatcttctaaaggcagcagtagccttgatagattatattccagaaaaatcagaaagcagcttgttcatcataaacagcaacttaacctactaaaagcaaagcagaaggcattggtagaacagatggaaaaagaaaaaatacaaagtaacaaaggatcatcatataaactcctggtagaacaagcaaaactaaagcaggccacttcaaagcactttaaggatttaattcgtttacgtcggacagcagaatggtcccgttctaatttagacacagaagttacaacagcaaaagaaagtcctgagatagaaccacttccatttactctggcccatgagcgttgtatctcagtagtccagaaacttgttctgtttcttctctccatggactttacatgtcatgcagatctcttattgtttgtttgtaaggttcttgcacgcattgcaaatgccacgaggccaactattcatctgtgtgagattgtgaacgaaccccagctggaaagactgctgttacttttggttggaactgacttcaatagaggagatatatcttggggtggtgcttgggctcagtattccttaacttgcatgctacaagatattttagcaggagaattactggctccagtagccgcagaagccatggaggaaggaacagtgggtgatgatgtaggtgcgacagctggtgactctgatgactcccttcaacagtcctcagttcagttgctggaaactatagatgaacctttgacacatgacataacaggtgcacctcctctgtcctctttggaaaaagataaagaaattgaccttgagttacttcaggatctaatggaagttgacattgatcctttagatattgatttggaaaaggaccctcttgcagccaaggtttttaagccaataagcagtacatggtatgattattggggtgctgattatgggacctacaattacaacccttacattggaggtctgggaattcctgtagcaaagccaccagcaaacacggagaagaacggatcacagacagttagcgtttcagtctctcaggccctggatgctcgcctagaagttggacttgaacagcaagcagaactgatgttgaaaatgatgtctactctggaggcagattccattttacaggcattaacaaatacatctcctacattatcacagtctcccactggaacagatgattcacttctagggggtttacaagcagcaaaccaaaccagccagcttattatacagttatcatctgtcccaatgttaaatgtttgtttcaacaaacttttttccatgcttcaagtccatcatgttcagttggagtcacttctccaattgtggctcacactgagcctgaattctagttcaactggaaacaaagaaaatggagcagacatatttttatataatgctaataggatacctgttatttcattaaatcaagcatcaataactagctttctcacagtgttagcttggtatcccaatactttgctccggacatggtgccttgtgcttcatagcctaacactcatgacaaacatgcagcttaattctggttccagcagtgccattggaactcaggagagtactgctcatttgttggtttcagatccaaacctaattcatgtattagtgaaatttctttctggcaccagtccacatggaacaaatcaacacagtccacaggttggtcctacagctacacaagctatgcaagaatttcttactcgattacaagtgcatctttcttcaacatgtcctcagatattcagtgaatttttgctcaagctaattcatatactttcaactgaaaggggtgctttccagacaggccaaggacctctcgatgcccaagtgaagctcttagaattcactctggagcagaattttgaagtcgtttcagttagtactatttctgccgtgatagaatcggttacatttttagtgcaccactatatcacttgctcagacaaagtaatgtcaagaagtggatcagatagctccgtgggtgctcgagcatgctttgggggactctttgccaatcttattcgtccgggtgatgcaaaagcagtttgtggcgaaatgacaagagatcaactcatgtttgatttgttaaaacttgttaacattttagtgcagctgcctctttcaggcaatagggaatacagtgcaagagtgtctgtgaccacaaatacaacagatagtgtttcagatgaagaaaaagtctcaggaggcaaagatggcaatggaagcagtaccagtgttcaaggatcgcctgcatatgttgctgacttagtcttagccaaccaacaaattatgagccagattttgtctgctctgggcctgtgtaatagcagtgccatggcaatgataattggagcaagtggattacatctcactaaacatgaaaactttcatggtgggttggatgccatatcagttggggatggattatttaccatactgacaacccttagtaaaaaagcttctacagtccacatgatgctgcagccaattttaacatacatggcctgtggatatatgggcagacaaggctctcttgctacttgccagttatctgagccattattgtggttcattttgagagtattggatactagtgatgccttgaaagcatttcatgatatgggtggtgttcagctcatatgcaataatatggttactagtacaagggctattgtgaacactgcaagaagtatggtatcaactattatgaaatttcttgactctggtccaaataaagctgttgacagcacattgaaaacaagaatactagcttctgagcctgacaatgctgaagggattcataactttgcacccctcggtacaatcacatctagcagtcctactgcccaaccagctgaagtgctattgcaggccacacctcctcacagaagagctcgctctgctgcttggtcctacatctttcttccagaggaggcttggtgtgaccttaccattcaccttcctgcagcagtgctgcttaaggagatacatatccagcctcatcttgcatctcttgcaacctgcccttcctcagtgtctgttgaagtaagtgcagatggggtaaatatgctacctttgtccactcctgttgtcacaagtggcctcacctacataaaaattcagcttgtaaaagccgaagtagcttctgctgtctgccttagactacatcgtccacgggatgccagcacattaggcctttcacaaattaaattattggggctcactgcttttggtaccacctcttctgcaacagttaataatccattccttccatctgaagatcaggtatccaaaacaagtattggatggttacggttattacatcattgccttactcacataagtgatctagaaggaatgatggcaagtgcagctgcacctactgctaatctgctgcagacttgtgcggccttattgatgtcaccttactgtggaatgcattcacccaacatcgaggttgtgcttgtaaagataggactgcagtctactagaattggcctgaagctcatagacattctcctgagaaattgtgcagcatcaggcagtgatcctacagatttgaatagtcctttactttttggaagactaaatggactctcttctgactctacgatagatattctttaccagcttggaacaactcaggatcctggtacaaaagacagaattcaggccttgttaaaatgggttagtgattctgcaagagtggctgctatgaagagaagtggcaggatgaactacatgtgtcctaactcctcaacagtagagtatggtcttctgatgccatctccttctcatttgcactgtgtagcagccattctgtggcatagttatgagctgcttgtagaatatgacttaccagcactcctggaccaagagctctttgagttactttttaattggtccatgtctcttccctgcaatatggttttgaagaaagctgttgacagtctactttgctcaatgtgtcacgtacacccaaactatttttctttgctcatgggctggatgggaattacccctcctccagtgcaatgtcatcatagactgtccatgacagatgatagcaaaaagcaggatcttagttcatctttaacagatgactctaaaaatgcacaagcacctctcgcattaactgaatcacatttggctacccttgcttcctcttctcaatctcctgaagctattaaacaattactagactcaggtttgccttctcttcttgtgaggagtctggctagtttctgctttagccacatttctagctcagaaagcattgcccagtcaatagatatttcccaggacaaactcaggcgccatcatgtcccacaacaatgtaataagatgcctatcacagccgacctagttgctcctattcttaggtttttgacagaagttggcaatagccatattatgaaagattggcttggtggttctgaagtcaatccactatggacagcacttctgtttttattgtgtcactctgggtccacttctggaagccataatttaggtgcacaacagaccagtgcaagatcagcttctctttcttcagctgctacaacaggactgactactcaacagcgcacagcaattgagaatgcaactgttgcgttctttctacagtgcatttcatgccatcctaataatcaaaagctgatggcacaggttctttgtgaactatttcagacatctcctcaaagagggaaccttccaacatctgggaacatttcagggtttatacgaagattatttttacagttgatgctggaagatgagaaagtgacaatgtttcttcagtctccatgtccactgtacaaaggtagaattaatgctactagccacgtcatccagcatccaatgtatggagcaggccacaaattccgtactcttcatttgccagtctcaacaacattatcagatgttcttgacagagtgtcagatactccaagtatcacagctaaattaattagtgaacaaaaagatgacaaagaaaagaaaaaccatgaagagaaagaaaaagttaaagcggaaaatggatttcaagacaattacagtgttgttgttgcctctgggctgaagtctcaatctaaacgtgctgtgtcagctacaccacctcgcccaccatccaggagggggaggacaatacctgataaaataggaagtacttcaggagcagaggctgccaacaaaataattactgtcccagtgtttcacctgtttcacaaactcttggcaggccagccattgccagctgaaatgacacttgcccagcttttaactctcctatatgaccgaaaacttcctcagggttaccgctcaatagatctgactgttaaattgggatcaagagttataacagaccccagtctatcaaaaacagattcttataaaagactacaccctgaaaaagatcatggagacttacttgctagctgtccagaagatgaggctctcactccaggtgatgaatgcatggatgggatactggatgaatctttgcttgaaacctgtccaattcagtcaccattacaagtttttgcaggaatgggtggactggctcttattgctgaaagactacccatgctatatccagaagtaattcaacaggtgagtgctccagttgtaacatctaccactcaggaaaagccgaaggatagcgatcagtttgaatgggtgaccattgaacagtcaggggagttagtttatgaagcaccagaaactgttgcggctgaacctccacctatcaagtcagcagtacagaccatgtctcccatacctgcccattctttggctgcttttggattatttcttcgtcttccgggctatgcggaagtgctactgaaagagagaaaacatgcccagtgccttcttcgattggtattgggagtgacagatgatggagaaggaagtcatattcttcaatctccatcagccaatgtgcttccaacccttcctttccacgtccttcgtagcttgtttagcactacacctttgacaactgatgatggtgtacttctaaggcggatggcattggaaattggagccttacacctcattcttgtctgtctctctgctttgagccaccattccccacgagttccaaactctagcgtgaatcaaactgagccacaggtgtcaagctctcataaccctacatcaacagaagaacaacagttatattgggccaaagggactggctttggaacaggctctacagcttctgggtgggatgtggaacaagccttaactaagcaaaggctggaagaggaacatgttacctgccttctgcaggttcttgccagttacataaatcccgtcagtagtgcggtaaatggagaagctcagtcatctcatgagactagagggcagaacagtaatgcccttccttctgtacttctcgagcttctcagtcagtcctgcctcatcccagccatgtcatcttatctacgaaatgattcagttctggacatggcaagacatgtgccactctatcgggcactgctggaattgcttcgggccattgcttcttgtgctgccatggtgcccctattgttgcccctttctacagagaacggtgaagaggaagaagaacagtcagaatgtcaaacttctgttggtacattgttagccaaaatgaagacctgtgttgatacctataccaaccgtttaagatctaaaagggaaaatgttaaaacaggagtaaaaccagatgcgtctgatcaagaaccagaaggacttactcttttggtaccagacatccaaaagactgctgagatagtttatgcagccaccaccagtttgcggcaagcaaatcaggaaaaaaaactgggtgaatactccaagaaggcggctatgaaacccaaacctttgtcagtattaaagtcacttgaagaaaaatatgtggctgttatgaagaaattacagtttgatacgtttgaaatggtttctgaagatgaagatgggaaattgggatttaaagtaaattaccactacatgtctcaggtgaaaaatgctaatgatgcgaacagtgctgccagagctcgccgccttgcccaggaagctgtgacgctttcaacctcactgcctctgtcttcatcctctagtgtgtttgtacgctgtgatgaggagcgacttgatatcatgaaggttctaataactggtccagcggacaccccttatgcaaatggctgctttgagtttgatgtgtattttcctcaagattatcccagttcaccccctcttgtgaatctagagacaactggtggtcatagcgtgcgattcaatccaaacctttataatgatggcaaggtttgtttaagcatcttaaacacgtggcatggaagaccagaagagaagtggaatcctcagacctcaagctttttgcaagtgttggtgtctgtccagtcccttatattagtagctgagccttattttaatgaaccgggatatgaacggtctagaggcactcccagtggcacacagagttctcgagaatatgatggaaacattcgacaagcaacagttaagtgggcaatgctagaacaaatcagaaacccttcaccatgttttaaagaggtaatacacaaacatttttacttgaaaagagttgagataatggcccaatgtgaggagtggattgcggatatccagcagtacagcagtgataagcgggtaggcaggactatgtctcaccatgcagcagctctcaagcgtcacactgctcagctccgcgaagagttgctgaaacttccctgccctgaaggcttggatcctgacactgacgatgccccagaggtgtgcagagccacaacaggtgctgaggagactctaatgcatgatcaggttaaacccagcagcagcaaagaactccccagtgacttccagttatgagctgcattgatgtggacttcatagacacaaaggcttcgaagcacaagccaaatatgtcaatatttgtatgtaagaaactaattatgtaataggtaatgaaactgaaactatactatgcccttaaggagatccagtttaattcaaggtgatcttttatttacctgtacaggagtgtaaacttttttgtgcttttatttttcaattgtgagaaccactgattggtatgttcaacaaatttgtgtatacaaagaaatggataaatcactgctatataagggaaactaccttaggaaagaatgtttactgaatgtttattttattttattttttttttactatagagtgaggggttgttaacaaagaatatatattggtcattcttacaactactatttaaagtcagcaacttttcactgaatttgatagattttatgtttggccatatcttcatgctcacatttgatttctgaagacctcctacatacacttcaataaaagttaaatggacatactccctcttttttgatttactggtacatttttaaaataataaatctgccataaaatgcattatatctggagacttgcacttgtatggatgaatttattacattcaacatatttaattttatgccttctaattctaagatgcagaaaaaaataaatgaacatgattttattctatgccaacatttgggcctctgaatgtatctgttatttgaatttaagtatttgaaaaggaatggtcaatttgaaagtcattctaaactgattttttttttctaaagggctccttttttcctggactatgtggttttatgactaaagtcacatgtatgtattaaacattgaggctctgtagaggagagaggatgtacctctctggtgctgttacagtacattctgtacctgccatacaggctcattttcatgcaaattcttcctagagccaaataaataaagacttaggtgaattagtatgtcttgtttctaaaaaaaaaaaaa

SEQ ID NO: 255 - DNA, 2450 bp, Homo sapiens
actaaggaccaaaggcatttctgggcactgagatcctacctctctgcctgcagctatgagcagacgtgtggttcggcaaagcaagttccgccatgtgtttgggcaggcagcaaaggccgaccaggcctacgaggacatccgtgtgtccaaggtcacatgggacagctccttctgtgccgtcaaccccaaattcctggccattattgtggaggctggaggcgggggtgccttcatcgtcctgcctctggccaagacagggcgagtggataagaactacccactggtcactgggcacactgcccctgtgctggatattgactggtgtccacacaatgacaacgttatcgccagtgcctcagacgacaccaccatcatggtgtggcagattccagactatacccccatgcgcaacattacggaacctatcatcacacttgagggccactccaagcgtgtgggcatcctctcctggcaccctactgccaggaatgtcctgctcagtgcaggtggtgacaatgtgatcatcatctggaatgtgggcaccggggaggtgctgctgagcctggatgatatgcacccagacgtcatccacagtgtgtgctggaacagcaacggtagcctgctagccaccacctgcaaggacaagaccttgcgcatcattgaccccagaaaaggccaagtggtggcggagaggtttgcggcccacgaggggatgaggcccatgcgggccgtcttcacgcgccagggccatatcttcaccacgggcttcacccgcatgagccagcgagagctgggcctgtgggacccgaacaacttcgaggagccagtggcactgcaggagatggacacaagcaacggggtcctattgcccttttacgatcccgactccagcatcgtctacctgtgtggcaagggcgacagcagcattcggtactttgagattaccgacgagccgcctttcgtgcactacctgaacacgttcagcagcaaagagccgcagcggggcatgggtttcatgcccaaaaggggactggatgtcagcaagtgtgagatcgcccggttctacaagctacacgaaagaaagtgtgaacctatcatcatgactgtgccccgcaagtcagacctcttccaggacgatctgtacccggatacgccaggcccggagccggccctagaagcggacgaatggctatccggccaggacgccgaacccgtgctcatttcgctgagggacggctatgtgccccccaagcaccgcgagctccgggtcacgaagcgcaacatcctggacgtgcgcccgccctccggcccccgccgcagccagtcggccagcgacgcccccttgtcgcagcagcacaccctggagacgctgctggaagagatcaaggccctccgcgagcgggtgcaggcccaggagcagcgcatcacggctctggagaacatgctgtgcgagctggtggacggcacggactagccccgcgcgccaggcaggcggagcggggcggggcgcacaagctcggccccgccccggcttttagtcccgaactccggaccccgccttcttgggctgggcccgggggcgggactggggagggaactccgcccctcgcgggagaccagaactcttggagcttaggggagacccacgtcgctccagcggaggctggactgcgagcctcgtctgggactcggctggagctggcctagggaggcctggggtaacctggggggctcagcaatggtgctgcacggcgaggtggtgtccccctttgtcctccgcccagggcagggaaagtgcttagtattagcgtgatgcttggggttattggagcctgagcttgacctcaaacgggtggcgatttgatgggtacccccaggctggggaaaatgacagcgcttctcctaatcagctcactggattccatcaccctgagcggtaaaccagatgggcgtcaccccagttctgcagacacatacacaacccgtttgctgcagagccggacccagtggctacacccacagcggtctgtggtagagaactctcttccttctttccaccgacaggggcgagggctgcttcctcgcggcagcccccgcgaagaaatctcgagagaactggcatgaggagttaggttcatcacaaatacacacacactgcccccaaccctctgccgttgcctctctcagaaaaacaagacgtactgaatgaaatattttactaagcgttcagtctgtgcctcctgcatgggtgggagtgaggggaacgagacccccagcctctgcaaatgctacccccaggctcctgggagacctggcgatgcactcctgggctcagggtccatcaggcagcctcttaccctagagctctctccactctgaggttcagaaggaccccaacccacaccgtaggcgttccccccaagtaaagttaggtagcaaaagcctccggt

SEQ ID NO: 256 - DNA, 3744 bp, Homo sapiens
atgtcactttttttaagggtagtatttagtttcacaatgtttggggacctgtttgaagaggagtattccactgtgtctaataatcagtatggaaaagggaagaaattaaagactaaagctttggagccacctgctcctagagaattcaccaatttaagcggaatcagaaatcagggtggaacctgttacctcaattcccttcttcagactcttcatttcacacctgaattcagagaagctctattttctcttggcccagaagagcttggtttgtttgaagataaggataaacccgatgcaaaggttcgaatcatccctttacagttacagcgcttgtttgctcagcttctgctcttagaccaggaagctgcatccacagcagacctcactgacagctttgggtggaccagtaatgaggaaatgaggcaacatgatgtgcaggaactgaatcgaatcctcttcagcgctttggaaacttctttagttgggacctccggtcatgacctcatctatcgtctgtaccatggaaccattgttaaccagattgtttgtaaagaatgtaagaacgttagcgagaggcaggaagacttcttagatctaacagtagcagtcaaaaatgtatccggtttggaagatgctctctggaacatgtatgtagaagaggaagtttttgattgtgacaacttgtaccactgtggaacttgtgacaggctggttaaagcagcaaagtcggccaaattacgtaagctgcctccttttcttactgtttcattactaagatttaattttgattttgtgaaatgcgaacgctacaaggaaactagctgttatacattccctctccggattaatctcaagcccttttgtgaacagagtgaattggatgacttagaatatatatatgacctcttctcagttattatacacaaaggtggctgctacggaggccattaccatgtatatattaaagatgttgatcatttgggaaactggcagtttcaagaggaaaaaagtaaaccagatgtgaatctgaaagatctccagagtgaagaagagattgatcatccactgatgattctaaaagcaatcttattagaggagaataatctaattcctgttgatcagctgggccagaaacttttgaaaaagataggaatatcttggaacaagaagtacagaaaacagcatggaccattgcggaagttcttacagctccattctcagatatttctactcagttcagatgaaagtacagttcgtctcttgaagaatagttctctccaggctgagtctgatttccaaaggaatgaccagcaaattttcaagatgcttcctccagaatccccaggtttaaacaatagcatctcctgtccccactggtttgatataaatgattctaaagtccagccaatcagggaaaaggatattgaacagcaatttcagggtaaagaaagtgcctacatgttgttttatcggaaatcccagttgcagagaccccctgaagctcgagctaatccaagatatggggttccatgtcatttactgaatgaaatggatgcagctaacattgaactgcaaaccaaaagggcagaatgtgattctgcaaacaatacttttgaattgcatcttcacctgggccctcagtatcatttcttcaatggggctctgcacccagtagtctctcaaacagaaagcgtgtgggatttgacctttgataaaagaaaaactttaggagatctccggcagtcaatatttcagctgttagaattttgggaaggagacatggttcttagtgttgcaaagcttgtaccagcaggacttcacatttaccagtcacttggcggggatgaactgacactgtgtgaaactgaaattgctgatggggaagacatctttgtgtggaatggggtggaggttggtggagtccacattcaaactggtattgactgcgaacctctacttttaaatgttcttcatctagacacaagcagtgatggagaaaagtgttgtcaggtgatagaatctccacatgtctttccagctaatgcagaagtgggcactgtcctcacagccttagcaatcccagcaggtgtcatcttcatcaacagtgctggatgtccaggtggggagggttggacggccatccccaaggaagacatgaggaagacgttcagggagcaagggctcagaaatggaagctcaattttaattcaggattctcatgatgataacagcttgttgaccaaggaagagaaatgggtcactagtatgaatgagattgactggctccacgttaaaaatttatgccagttagaatctgaagagaagcaagttaaaatatcagcaactgttaacacaatggtgtttgatattcgaattaaagccataaaggaattaaaattaatgaaggaactagctgacaacagctgtttgagacctattgatagaaatgggaagcttctttgtccagtgccggacagctatactttgaaggaagcagaattgaagatgggaagttcattgggactgtgtcttggaaaagcaccaagttcgtctcagttgttcctgttttttgcaatggggagtgacgttcaacctgggacagaaatggaaatcgtagtagaagaaacaatatctgtgagagattgtttaaagttaatgctgaagaaatctggcctacaaggagatgcctggcatttacgaaaaatggattggtgctatgaagctggagagcctttatgtgaagaagatgcaacactgaaagaacttctgatatgttctggagatactttgcttttaattgaaggacaacttcctcctctgggtttcctgaaggtgcccatctggtggtaccagcttcagggtccctcaggacactgggagagtcatcaggaccagaccaactgtacttcgtcttggggcagagtttggagagccacttccagccaaggtgcttctgggaacgagcctgcgcaagtttctctcctctacttgggagacatagagatctcagaagatgccacgctggcggagctgaagtctcaggccatgaccttgcctcctttcctggagttcggtgtcccgtccccagcccacctcagagcctggacggtggagaggaagcgcccaggcaggcttttacgaactgaccggcagccactcagggaatataaactaggacggagaattgagatctgcttagagccccttcagaaaggcgaaaacttgggcccccaggacgtgctgctgaggacacaggtgcgcatccctggtgagaggacctatgcccctgccctggacctggtgtggaacgcggcccagggtgggactgccggctccctgaggcagagagttgccgatttctatcgtcttcccgtggagaagattgaaattgccaaatactttcccgaaaagttcgagtggcttccgatatctagctggaaccaacaaataaccaagaggaaaaagaaaaaaaaacaagattatttgcaaggggcaccgtattacttgaaagacggagatactattggtgttaagaatctcctgattgacgacgatgatgatttcagtacaatcagagatgacactggaaaagaaaagcagaaacaacgggccctggggagaaggaaaagccaagaagccctccatgagcagagcagctacatcctctccagtgcagagacgcctgcccggccccgagccccggaaacttctctctccatccacgtggggagcttcagataa

SEQ ID NO: 257 - DNA, 2555 bp, Homo sapiens
ccggcgcgccgcggggtgagcggcgccgggcctgaggtcgcccagacgccgtcggggcggagccgggtcgcgaggctgcatcccggccggcggttccggagcctcgcggctggggaggcgcggcccgggacgctcgagcttagggagatctgccttctggagactgcgccgtcctcccgggagagccagaaagaggacatggctgctgggcagcgggaagcgaggccccaggtgtcactgacgtttgaggatgtggctgtgctgtttacccgagatgagtggagaaagctggccccttctcagagaaacttgtaccgggatgtgatgctggagaactataggaacctggtctcactggggctcccatttaccaaaccaaaagtgatctccctgttgcagcaaggagaagatccctgggaggtggagaaagacggttctggcgtctcctctctaggatcgaagagcagtcataaaaccacaaagtcaacgcaaacacaagactcttcatttcagggactgatactgaaaagatccaacaggaatgtaccttgggatttgaaattagaaaagccttacatatatgaaggcagattagagaaaaagcaggataaaaagggaagttttcagatagtttcagccacccacaaaaaaatccccactatagaaagaagccataaaaatactgaattgagccaaaacttcagcccaaagtcagtgcttattaggcaacagatacttcccagagaaaaaacaccaccaaaatgtgaaatacaaggaaacagcctcaaacagaattcacaattacttaatcaaccaaaaattacagcagataaacgctataaatgtagtctgtgtgaaaaaaccttcattaacacttcatcccttcgtaaacatgagaaaaaccatagtggagagaaactatttaagtgtaaagaatgttcaaaagcctttagccaaagttcagctcttattcaacatcaaataacgcatactggagagaaaccctacatatgtaaagaatgtgggaaagcctttactctcagtacatccctttataaacatctaagaacccatactgtggagaaatcctacagatgtaaagaatgtggtaaatccttcagccgaaggtcaggcctttttatacatcaaaaaattcatgctgaagaaaacccttgtaagtataatccgggtaggaaggcatctagttgcagcacatccctttctggatgtcaaagaattcattctagaaagaagtcctacttatgtaatgaatgtggcaacacctttaagtctagctcatcccttcgttatcatcagagaattcacactggagagaagccttttaaatgtagtgaatgtgggagagccttcagccagagtgcctctcttattcaacatgaaagaattcacaccggagaaaagccctatagatgcaatgaatgtgggaaaggctttacttctatttcacgacttaatagacaccgaatcattcatactggagagaagttttataattgtaatgaatgtggtaaagccttaagctcccactcaacacttattattcacgagcgaattcatactggagaaaaaccatgtaaatgtaaagtatgtggaaaagccttcagacagagttcagctctcattcaacatcagagaatgcatactggagaaagaccctataaatgtaacgagtgtgggaaaacattcaggtgtaactcatcacttagtaatcaccagagaattcatactggagagaaaccatatcgatgtgaggaatgtgggatatcttttggccaaagttcagctcttattcagcatcgaaggattcatacaggagaaaaaccctttaaatgtaatacatgtggaaaaacttttagacaaagctcatcacgtattgcacatcagagaattcatactggagagaaaccctatgaatgtaatacatgtgggaaacttttcaaccataggtcatcccttactaatcattataaaattcatatcgaagaggacccctagaaagtagatttgtatgtgtgaaagccttaaaccaaagctcatcgaagaatacatccttgagagagatgtaataaatgtaatggatgtgaaaaaaactgtaataatttagccctcattaggtatttaattccatggataaacctcagctatataatagatatgaggaaagtgtttgtgcctgtcagacacttaaaaaaataacctgagatgaagaatttacaattgaagacattgactttagccatttgtgaaatgggtttgctttttcccttttcctacagacgtatatgctagatgtcacgtgatcatcagaaacagatatccgagtgggtggggaggtgtgctttagatttctcattagaagaccaccaaactggtaatatttttatagcattttaatagcttgatcaaattgtacctttttagagaaaaggaccaaaataaaagaaaaatgaattatgaactacctctcagtctctggggtttgtccttttcctaccctgatgtcaaacttatgcatggatttcattaaaaaagaa

SEQ ID NO: 258 - DNA, 7859 bp, Homo sapiens
cgccaaatttctcccctgaagcagaggtggtagccaacggctccatgtctctgaggagcggcgggcggcggcgcgcggacccaggcgcggatggcgaggccagcagggatgatggcgccacttcctcagtttcggcactcaagcgcctggaacggagtcagtggacggataagatggatttgcggtttggttttgagcggctgaaggagcctggtgagaagacaggctggctcattaacatgcatcctaccgagattttagatgaagataagcgcttaggcagtgcagtggattactactttattcaagatgacggaagcagatttaaggtggctttgccctataaaccgtatttctacattgcgaccagaaagggttgtgagcgagaagtttcatcttttctctccaagaagtttcagggcaaaattgcaaaagtggagactgtccccaaagaggatctggacttgccaaatcacttggtgggtttgaagcgaaattacatcaggctgtccttccacactgtggaggatcttgtcaaagtgaggaaggagatctcccctgccgtgaagaagaacagggagcaggatcacgccagcgacgcgtacacagctctgctttccagtgttctgcagaggggcggtgtcattactgatgaagaggaaacctctaagaagatagctgaccagttggacaacattgtggacatgcgcgagtacgatgttccctaccacatccgcctctccattgacctgaagatccacgtggctcattggtacaatgtcagataccgaggaaatgcttttccggtagaaatcacccgccgagatgaccttgttgaacgacctgaccctgtggttttggcatttgacattgagacgaccaaactgcccctcaagtttcctgatgctgagacagaccagattatgatgatttcctacatgatcgatggccagggctacctcatcaccaacagggagattgtttcagaagatattgaagattttgagttcacccccaagccagaatatgaaggccccttttgtgtcttcaatgaacccgatgaggctcatctgatccaaaggtggtttgaacacgtccaggagaccaaacccaccatcatggtcacctacaacggggacttttttgactggccatttgtggaggcccgggcagcagtccacggtctgagcatgcagcaggagataggcttccagaaggacagccagggggagtacaaggcgccccagtgcatccacatggactgcctcaggtgggtgaagagggacagttaccttcctgtgggcagtcataatctcaaggcggccgccaaggccaagctaggctatgatcccgtggagctagacccggaggacatgtgccggatggccacggagcagccccagactctggccacgtattctgtgtcagatgctgtcgccacttactacctgtacatgaagtacgtccacccattcatctttgctctgtgcaccattattcccatggagcccgacgaggtgctgcggaagggctctggcactctgtgtgaggccttgctgatggtgcaggccttccacgccaacatcatcttccccaacaagcaagagcaggagttcaataagctgacggacgacggacacgtgctggactctgagacctacgtcgggggccacgtggaggccctcgagtctggggttttccgcagcgatatcccttgccggtttaggatgaatcctgccgcctttgacttcctgctgcagcgggttgagaagaccttgcgccacgcccttgaggaagaggagaaagtgcctgtggagcaagtcaccaactttgaagaggtgtgtgatgagattaagagcaagcttgcctccctgaaggacgttcccagccgcatcgagtgtccactcatctaccacctggacgtgggggccatgtaccccaacatcatcctgaccaaccgcctgcagccctctgccatggtggacgaagccacctgtgctgcctgtgacttcaataagcctggagcaaactgccagcggaagatggcctggcagtggaggggcgagttcatgccagccagtcgcagcgaataccatcggatccagcaccagctggagtcagagaagttcccccccttgttcccagaggggccagctcgggcctttcatgaactgtcccgcgaggaacaggcgaaatacgagaagagaaggctggcggattactgccggaaagcctacaagaagatccacatcaccaaggtggaagagcgtctcaccaccatctgccagcgggaaaactccttctacgtggacaccgtgcgtgccttccgggacaggcgttacgagttcaaagggctccacaaggtgtggaaaaagaagctctcggcggccgtggaggtgggcgacgcggctgaggtgaagcgctgcaagaacatggaggtgctgtatgactcgctgcagctggcccacaagtgcatcctgaactccttctatggctatgtcatgcgcaagggggctcgctggtactccatggagatggctggcatcgtctgcttcacaggggccaacatcatcacccaggcacgggagctgatcgagcagattgggaggcccttagagctggacacagatggtatatggtgcgtcctgcccaacagcttcccagaaaattttgtcttcaagacgaccaatgtgaagaagcccaaagtgaccatctcctacccaggcgccatgttgaacatcatggtcaaggaaggcttcaccaatgaccagtaccaggagctggctgagccgtcctcactcacctacgtcacccgctcagagaacagcatcttttttgaggttgatgggccctaccttgccatgattcttccagcctccaaggaagaaggcaagaaattgaagaagaggtatgctgtgttcaatgaagacggttctctggctgagctcaagggctttgaggtcaaacgccgcggggaactgcagctgattaagatcttccaatcctcggtgtttgaggccttcctcaagggcagcacgctggaagaggtgtatggctctgtagccaaggtggctgactactggctggacgtgctgtacagcaaggcagccaacatgcctgactctgagctattcgagctcatctctgagaaccgttccatgtctcggaagctggaagattacggggagcagaagtctacgtccatcagcacagcaaagcgcctggccgagttcctgggagaccagatggtcaaggatgcagggctgagttgccgctacatcatctcccgcaagcccgagggctcccctgtcacggagagggccatcccacttgccattttccaagcagagcccacggtgaggaagcactttctccggaaatggctcaagagctcttcccttcaagactttgatattcgagcaattctggattgggactactacattgagcggctgggaagcgccatccagaagatcatcaccatccctgcggccctgcagcaggtaaagaacccagtgccacgtgtcaaacaccccgactggctgcacaaaaaactgctggagaagaatgatgtctacaagcagaagaagatcagtgagctcttcaccctggagggcaggagacaggtcacgatggccgaggcctcagaagacagtccgaggccaagtgctcctgacatggaggacttcggcctcgtaaagctgcctcacccagcagcccctgtcactgtgaagaggaagcgagttctttgggagagccaggaggagtcccaggacctcacgccgactgtgccctggcaggaaatcttggggcagcctcccgccctgggaaccagccaggaggaatggcttgtctggctccggttccacaagaagaagtggcagctgcaggcccggcagcgcctcgcccgcaggaagaggcagcgtctggagtcggcagagggtgtgctcaggcccggggccatccgggatggtcctgccacggggctggggagcttcttgcgaagaactgcccgcagcatcctggaccttccgtggcagattgtgcagatcagcgagaccagccaggccggcctgttcaggctgtgggcgctcgttggcagtgacttgcactgcatcaggctgagcatcccccgtgtgttctacgtgaaccagcgagtcgctaaagcggaggagggtgcttcgtatcgcaaggtaaatcgggtccttcctcgctccaacatggtctacaatctctatgagtattcagtgccagaggacatgtaccaggaacacatcaacgagatcaacgctgagctgtcagcgccagacatcgagggcgtatatgagactcaggttccgttactgttccgggccctggtgcacctgggctgtgtgtgtgtggtcaataaacagctggtgaggcacctttcaggctgggaagcagagacctttgctcttgagcacctggagatgcgctctctggcccagttcagctacctggaaccagggagtatccgccatatctacctgtaccaccacgcacaggcccacaaagcgctcttcgggatcttcatcccctcacagcgcagggcatccgtctttgtgctggacactgtgcgcagcaaccagatgcccagccttggcgccctgtactcagcagagcacggcctcctcctggagaaggtgggccctgagctcctgccaccccccaaacacaccttcgaagttcgggcagaaactgacctgaagaccatctgcagagccatccagcgattcctgctcgcctacaaggaggagcgccgggggcccacactcatcgctgttcagtccagctgggagctgaagaggctggccagtgaaattcctgtcttggaggaattcccactggtgcctatctgtgtggctgacaagatcaactatggggtcctggactggcagcgccatggagcccggcgcatgatccgtcactacctcaacctggacacctgcctgtcgcaggccttcgagatgagcaggtactttcacattcccattgggaacctaccagaggacatctccacattcggctccgacctcttctttgcccgccacctccagcgccacaaccacctgctctggctgtcccctacagcccgccctgacctgggtggaaaggaggctgatgacaactgtcttgtcatggagttcgatgaccaagccactgttgagatcaacagttcaggctgttactccacagtgtgtgtggagctggaccttcagaacctggccgtcaacaccattctccagtctcaccatgtcaacgacatggagggggccgacagcatggggatcagcttcgacgtgatccagcaggcctccctggaggacatgatcacgggtggtcaggctgccagtgccccggccagctacgatgagacagccctgtgctctaacaccttcaggatcctgaagagcatggtcgtgggctgggtgaaggagatcacccagtaccacaacatctatgcagacaaccaggtgatgcacttctaccgctggcttcggtcgccatcctctctgcttcatgaccctgccctgcaccgcacactccacaacatgatgaagaagctcttcctgcagctcatcgctgagttcaagcgcctggggtcatcagtcatctacgccaacttcaaccgcatcatcctctgtacaaagaagcgccgtgtggaagatgccatcgcttacgtggagtacatcaccagcagcatccattcaaaggagaccttccattctctgacaatttctttctctcgatgctgggaatttcttctctggatggatccatctaactatggcggaatcaaaggaaaagtttcatctcgtattcactgtggactgcaagactcccagaaagcagggggagcagaggatgagcaggaaaatgaggacgatgaggaggaaagagatggggaggaggaggaagaggcggaggaatccaacgtggaggatttactggaaaacaactggaacattttgcagtttttgccacaggcagcctcctgccagaactacttcctcatgattgtttcagcgtacatcgtggccgtgtaccactgcatgaaggacgggctgaggcgcagtgctccagggagcacccccgtgaggaggaggggggccagccagctctcccaggaggccgagggggcggtcggagcccttcccggaatgatcaccttctctcaggattatgtcgcaaatgagctcactcagagcttcttcaccatcactcagaagattcagaagaaagtcacaggctctcggaactccactgagctctcagagatgtttcctgtcctccccggttcccacttgctgctcaataaccctgccctggagttcatcaaatacgtgtgcaaggtgctgtccctggacaccaacatcacaaaccaggtgaataagctgaaccgagacctgcttcgcctggtggatgtcggcgagttctccgaggaggcccagttccgagacccctgccgctcctacgtgcttcctgaggtcatctgccgcagctgtaacttctgccgcgacctggacctgtgtaaagactcttccttctcagaggatggggcggtcctgcctcagtggctctgctccaactgtcaggcgccctacgactcctctgccatcgagatgacgctggtggaagttctacagaagaagctgatggccttcaccctgcaggacctggtctgcctgaagtgccgcggggtgaaggagaccagcatgcctgtgtactgcagctgcgcgggagacttcgccctcaccatccacacccaggtcttcatggaacagatcggaatattccggaacattgcccagcactacggcatgtcgtacctcctggagaccctggagtggctgctgcagaagaacccacagctgggccattagccagccccgggccccgggtgcctctgcgtccgtgccaggcctcctgatgccaaggccacatccccgtgcttccagtgaccagaccactgaccaccctgactgtccaaacctgtgaccccaggccagggaacggggaggaaaccaaagaaaaccattttcagggagctcagacgtcacaggagggagcgggagcaggatgtggccctggcctcgccagagcacctgaagaagcaggccgtgagcgaggctgcgagtgccctgggcgccgtttctcacgcagtgaatgcttttccaggcctctgttgcttcctgcaccacacctggtggggtgggagcgtcctctaggtgcccctagttctttgtcctgcctcccagagggaggaaaagcccctgggggcttctggctccctgagattgggctctgagacgagacgggttcccaaggccctggtggggctggagtctcacctgtttgcatggagaaatgggctggccccacagcctcacaggagcagtttgtgggctggtttccccaggaatccagaccctaacccgtgagaatctggattttggcttgtgagccctgcttatttggagccgggtctagagggaaccctctatcagcctcaggaaaacaagacctctgtgcacctcacttttggctcactgcagcccttgtccttcacctccacacaggaccagctggaagcagaaagaagaaaggccaatttcacagggcaccaaacaagtatgaaatgtaaatcagaaatgcagacaccccagacgagagcctcacaggagggagggggccccacaggctccccaggaggctcgtgtctttggcccagagccagccttagtttgtccctgccatctactgtctgaggccatcgctgctacactttgtttttatttgtatttcatactgaagtttcaaaaaaaaaaaaaaaaaaa

SEQ ID NO: 259 - DNA, 2401 bp, Homo sapiens
agcctcccgcccgccgcctctgtctccctctctccacaaactgcccaggagtgagtagctgctttcggtccgccggacacaccggacagatagacgtgcggacggcccaccaccccagcccgccaactagtcagcctgcgcctggcgcctcccctctccaggtccatccgccatgtggcccctgtggcgcctcgtgtctctgctggccctgagccaggccctgccctttgagcagagaggcttctgggacttcaccctggacgatgggccattcatgatgaacgatgaggaagcttcgggcgctgacacctcgggcgtcctggacccggactctgtcacacccacctacagcgccatgtgtcctttcggctgccactgccacctgcgggtggttcagtgctccgacctgggtctgaagtctgtgcccaaagagatctcccctgacaccacgctgctggacctgcagaacaacgacatctccgagctccgcaaggatgacttcaagggtctccagcacctctacgccctcgtcctggtgaacaacaagatctccaagatccatgagaaggccttcagcccactgcggaagctgcagaagctctacatctccaagaaccacctggtggagatcccgcccaacctacccagctccctggtggagctccgcatccacgacaaccgcatccgcaaggtgcccaagggagtgttcagcgggctccggaacatgaactgcatcgagatgggcgggaacccactggagaacagtggctttgaacctggagccttcgatggcctgaagctcaactacctgcgcatctcagaggccaagctgactggcatccccaaagacctccctgagaccctgaatgaactccacctagaccacaacaaaatccaggccatcgaactggaggacctgcttcgctactccaagctgtacaggctgggcctaggccacaaccagatcaggatgatcgagaacgggagcctgagcttcctgcccaccctccgggagctccacttggacaacaacaagttggccagggtgccctcagggctcccagacctcaagctcctccaggtggtctatctgcactccaacaacatcaccaaagtgggtgtcaacgacttctgtcccatgggcttcggggtgaagcgggcctactacaacggcatcagcctcttcaacaaccccgtgccctactgggaggtgcagccggccactttccgctgcgtcactgaccgcctggccatccagtttggcaactacaaaaagtagaggcagctgcagccaccgcggggcctcagtgggggtctctggggaacacagccagacatcctgatggggaggcagagccaggaagctaagccagggcccagctgcgtccaacccagccccccacctcgggtccctgaccccagctcgatgccccatcaccgcctctccctggctcccaagggtgcaggtgggcgcaaggcccggcccccatcacatgttcccttggcctcagagctgcccctgctctcccaccacagccacccagaggcaccccatgaagcttttttctcgttcactcccaaacccaagtgtccaaggctccagtcctaggagaacagtccctgggtcagcagccaggaggcggtccataagaatggggacagtgggctctgccagggctgccgcacctgtccagacacacatgttctgttcctcctcctcatgcatttccagcctttcaaccctccccgactctgcggctcccctcagcccccttgcaagttcatggcctgtccctcccagacccctgctccactggcccttcgaccagtcctcccttctgttctctctttccccgtccttcctctctctctctctctctctctctctctctttctgtgtgtgtgtgtgtgtgtgtgtgtgtgtgtgtgtgtgtgtgtgtcttgtgcttcctcagacctttctcgcttctgagcttggtggcctgttccctccatctctccgaacctggcttcgcctgtccctttcactccacaccctctggccttctgccttgagctgggactgctttctgtctgtccggcctgcacccagcccctgcccacaaaaccccagggacagcggtctccccagcctgccctgctcaggccttgcccccaaacctgtactgtcccggaggaggttgggaggtggaggcccagcatcccgcgcagatgacaccatcaaccgccagagtcccagacaccggttttcctagaagcccctcacccccactggcccactggtggctaggtctccccttatccttctggtccagcgcaaggaggggctgcttctgaggtcggtggctgtctttccattaaagaaacaccgtgcaacgtgaaaaaaaaaaaaaaaaaaaaa

SEQ ID NO: 260 - DNA, 2412 bp, Homo sapiens
tggaaaggagagctaccatcactaagggctgaaaacacagttaaatcactttcaaagttaaaagactattaagaacacaagatggggactcctgcttctggaaggaaaagaacacctgtgaaagaccgattttctgcagaagatgaagctttgagtaacattgccagagaggcagaggcaaggctggcagcaaaacgggctgcccgggcagaagcaagagatatacgcatgagagaactggaacgacaacaaaaagagtactctcttcattcctttgatcggaagtggggacagattcagaagtggctggaagattcggaaagggccaggtattcccaccggtccagtcaccatcgtccttatctgggagttgaggatgcattgtccattcgaagtgttggcagtcacaggtatgatatgttcaaggatagatcatcaagactttcatcattaaatcattcttacagtcactctcatggaatgaagaagaggtcttctgattctcataaagacctactgagtggcctctactttgaccagagaaactatagcagtcttagacatagcaaacccacctctgcctactacactcggcagtcttcttccctgtacagtgaccctctggcaacatataagagtgacagggcctctcctactgcaaattctggtctgctgagaagtgccagtctggcatcattgtacaatggtggattatataacccttatggtcctcgaactccatctgaatgcagttattattcatcaagaataagttcagcccgaagcagtccagggtttaccaacgatgacactgcaagcattgtgtcttctgatcgtgccagtcgtggacgaagggagagtgtggtatctgccgctgattatttcagtcgctccaatcgtaggggaagtgttgtctctgaggtggatgatatcagtatcccagatttgtccagcttggatgaaaaatctgacaaacagtatgctgaaaattatacaagaccttcatctcgaaattctgcctcagcaacaacccctctaagtggaaactcatccagacgaggaagtggggacaccagcagcttaatagatccagacacttcattaagtgaattgcgggatatctatgaccttaaggaccagatacaggatgtagaagggagatacatgcaggggcttaaagaactaaaggaatctttgtctgaagtggaagaaaaatacaagaaagccatggtttccaatgcacagttagacaatgagaagaacaatttgatctaccaagtagacacactcaaggatgttattgaagagcaggaggaacagatggcagaattttatagagaaaatgaagaaaaatcaaaggagttagaaaggcagaaacatatgtgtagtgtgctgcagcataagatggaagaacttaaagaaggcctgcggcaaagagatgagcttattgaggagaagcagcgcatgcagcagaaaatagacaccatgacaaaagaggtgtttgacctccaggagacacttctttggaaagataaaaaaattggggccctagagaaacagaaagaatacattgcctgccttaggaatgagcgagatatgctcagagaggagctggctgacctgcaggagacagtgaagacgggagagaaacatggcttagttataatccccgatggcactcccaatggtgatgtcagtcatgaaccagtggctggagccatcactgttgtgtctcaggaagctgctcaggtcttggagtcagcaggagaagggccattagatgtaaggctacgaaaacttgctggagagaaggaagaactactgtcacagattagaaaactgaagcttcagttagaggaggaacgacagaaatgctccaggaatgatggcacagtgggtgacctggcaggactgcagaatggctcagacttgcagttcatcgaaatgcagagagatgccaatagacaaattagcgaatacaaatttaagctttcaaaagcagaacaggatataactaccttggagcaaagtattagccggcttgagggacaggttctgagatataaaactgctgctgagaatgctgagaaagttgaagatgaattgaaagcagaaaaacggaagctacaacgagagttacgaacagcactggacaagattgaggagatggagatgaccaacagccacctggccaagcggctggagaagatgaaggccaataggacagcacttctggcccagcagtaggaaaaccacccttcaacctgggtgatgctccttggggccctacctagagggactgacttttgtccattgacacaaaccccttttagtactgttttgagttttgtcattaaaacagccacctttgtattttataatttatgacagaatgaagtcattttgaatcta

SEQ ID NO: 261 - DNA, 2350 bp, Homo sapiens
gctctatcctcgcgtctgctcccagctccgggctcccggggctgaggtggagccgcgggacgccggcagggttgtggcgcagcagtctccttcctgcgcgcgcgcctgaagtcggcgtgggcgtttgaggaagctgggatacagcatttaatgaaaaatttatgcttaagaagtaaaaatggcaggcttcctagataattttcgttggccagaatgtgaatgtattgactggagtgagagaagaaatgctgtggcatctgttgtcgcaggtatattgttttttacaggctggtggataatgattgatgcagctgtggtgtatcctaagccagaacagttgaaccatgcctttcacacatgtggtgtattttccacattggctttcttcatgataaatgctgtatccaatgctcaggtgagaggtgatagctatgaaagcggctgtttaggaagaacaggtgctcgagtttggcttttcattggtttcatgttgatgtttgggtcacttattgcttccatgtggattctttttggtgcatatgttacccaaaatactgatgtttatccgggactagctgtgttttttcaaaatgcacttatattttttagcactctgatctacaaatttggaagaaccgaagagctatggacctgagatcacttcttaagtcacattttccttttgttatattctgtttgtagataggttttttatctctcagtacacattgccaaatggagtagattgtacattaaatgttttgtttctttacatttttatgttctgagttttgaaatagttttatgaaatttctttatttttcattgcatagactgttaatatgtatataatacaagactatatgaattggataatgagtatcagttttttattcctgagatttagaacttgatctactccctgagccagggttacatcatcttgtcattttagaagtaaccactcttgtctctctggctgggcacggtggctcatgcctgtaatcccagcactttgggaggccgaggcgggccgattgcttgaggtcaagtgtttgagaccagcctggccaacatggcgaaaccccatctactaaaaatacaaaaattagccaggcatggtggtgggtgcctgtaatcccaactacctaggaggctgaggcaggagaatcgcttgaacccggggggcagaggttgtagtgagctgagtttgcgccactgcactctagcctgggggagaaagtgaaactccctctcaaaaaaaagaaggaccactctcagtatctgatttctgaagatgtacaaaaaaatatagcttcatatatctagaatgagcactgagccataaaaggttttcagcaagttgtaacttattttggcctaaaaatgaggtttttttggtaaagaaaaaatatttgttcttatgtattgaagaagtgtacttttatataatgattttttaaatgcccaaaggactagtttgaaagcttcttttaaaaagaattcctctaatatgactttatgtgagaagggataatacatgatcaaataaactcagttttttatggttactgtaaaaagactgtgtaaggcagctcagcaccatgcttctcgtaaaagcagcttcaaatatccactggggttatcttttgacaacttgccattatctgatgttacacaattcaatagcaagcaagtttgagacaatcgcagtttaaaagcatgaaccatttaacaaaaagtggaataattaaagataaagcacttcttcccaaagggaattatcacctagtgaaaaattatgcatttcatctactcagttaccgactgcaagtctctcctcgctctagctctcaagctttgggtgaatattcctgtgaaatatatcttcaacttgaaagttcatactccaatcaaaaactccttttactgagtttgcagtactgtatttgcactgtttgtattcctctgggcccttattgctacttttgctttcctttgttacacagattttgtgttgcactttttctccagaggggtgttgtagagccttggttgtatgaataataccagtggtagtgtccacggctctaatgtaagcccatttggcatcactcctctcctctctcttgagaggatttcttgtgcacagagtatgaagcagttgtggagcgctgtgcctttgtcaagataccatcttgtttgatgacttctttctttgctgttttttcttcaaaatgttagtaagctctgtcatgcttctagcaaattgtaagactaattatttgtttccacctcataacctgttgcaataaatattacttctcatacaaaaaaaaaaaaaaaaaaa

SEQ ID NO: 262 - DNA, 4096 bp, Homo sapiens
acgatggcagcgtcagtggcagctgcagcccggaggctgcggcgggccattcgaaggtcgcccgcatggcggggcctcagccatcggccgctctcatcggagccccctgcagccaaggcctcggccgtgagggccgcctttctgaacttctttcgggaccgccatggccaccggctggtgccctccgcttccgtgcggccccgcggcgaccccagtttgctttttgtcaatgcgggcatgaaccagttcaagccaatctttctgggcaccgtggatccacgaagcgagatggcaggcttccgacgtgtggccaacagccagaaatgtgtgagagctggaggacaccataacgacctggaagatgtgggtcgagacctttcccatcataccttctttgaaatgcttggcaattgggcctttgggggtgaatattttaaggaggaggcttgtaacatggcctgggaactgctgactcaggtctatgggatccctgaggaaaggctctggatctcctactttgatggtgaccccaaggcagggctggacccagacctggagaccagggacatctggctgagcttaggggtgcctgctagccgtgtgctttcctttggaccacaagagaacttctgggagatgggggatactggcccttgtgggccctgtactgagatccactacgaccttgctggtggggtgggagccccccagctggtagagctttggaacctggtcttcatgcaacacaacagagaggcagatggaagcctgcagcccctgccccagcggcatgtggacacaggaatgggcctggaaaggctggtggctgtgctgcaaggcaaacactccacctatgacactgacctcttttccccgctgctcaacgccatacagcagggctgcagggcacccccttacttgggccgagtaggggtggcagacgaggggcgcacagacacagcgtaccgcgtggtggctgaccacatccgcacactcagtgtctgcatctctgatggcgtcttccctgggatgtcaggtcccccgctggttcttcgtcggatcctgcgtcgagctgtgcgtttctccatggagatcttaaaggcaccacctggcttcctaggcagcctggtacctgtagtggtggagacactgggagatgcttatccagaactgcaaaggaactcagcccagatcgccaacctggtgtcagaggacgaggcagccttcctggcctccctggagcggggtaggcggatcattgatcggactctgaggaccctggggccttcagatatgttccctgctgaagtggcctggtccttgtcactgtgtggagacctgggactccccttggacatggtagagctgatgctggaggagaaaggggtccagctagactccgctggactggagcggttggcccaagaggaggcccagcaccgggcacggcaggctgagccagttcagaagcagggattgtggcttgatgtccatgcgcttggggagctgcagcgccaaggagtgcccccaactgacgacagccccaagtacaactactccctgcgacccagcggaagttatgagttcggcacctgtgaggcccaggtgttgcaactgtatacagaggacgggacagcagtggcctccgtggggaaaggccagcgctgtggcctcctcttggacaggaccaacttctacgcagaacaggggggccaggcttcagaccgtggctacctggtgcgggcagggcaagaggacgtgctgttcccagtagcccgggcccaggtctgtggaggtttcatcctgcatgaggcagtagcccctgagtgcctgcggttaggggaccaggtgcagctgcatgtggatgaggcctggcgtctaggctgcatggcgaagcatacggccacccacctgctgaactgggcactgaggcagaccctgggccctggcacagagcagcagggctcccatctcaatcctgagcagctgcgcttggatgtgaccacccagaccccattgaccccagagcagctccgggcagtggagaacactgtgcaggaggccgtggggcaggatgaggctgtgtacatggaggaggtgcccctggcgctcactgcccaggtccctggcctgcgctctctggatgaggtttacccagaccctgtgcgggtggtatcagtgggggtgcccgtggcccatgcattggacccagcctcccaagccgcactgcagacctctgtggagctatgctgtgggacgcacctgttacgtactggggctgtaggggacctggttatcatcggggaccgccagctttccaagggcactacccgcctgctggccgtcactggggagcaggcccagcaggcccgagagctaggccagagcctggcccaggaagtgaaagcggccactgagcggctgagtctggggagccgggatgtggcggaggcactgaggctgtccaaggacataggacgactcattgaagctgtggaaactgctgtgatgccccagtggcagcggcgggagctgctggccacagtgaagatgctgcagcggcgtgccaacactgccatccgtaagctgcaaatgggacaggctgcaaagaaaactcaggagctgctggagcggcactcgaaggggcctctgattgtggacacagtctctgctgagtctctctcagtgctggtgaaggtggtacggcagctgtgtgagcaggcccccagcacgtctgtgctcctactcagcccccagcccatggggaaggtgctgtgtgcctgtcaggtggcccagggtgccatgcccaccttcacagcagaggcctgggcactggcagtgtgcagccacatggggggcaaggcgtggggctcgcgagtggtggcccaaggcaccggaagcactactgacctggaagctgccctcagtatagcccaaacctatgccctcagccagctctgacccaggtccgcccagggacccacatggactaaaggcaatgccaggagccctgaaggagccagcagaaccttcccacatgctgaagcgaggactagaggctggaggccaagcagctgagccaaagaagatcacctgggccagggcctacatgacacaaggagacatgggctagggaaggcagaactgggcccaaagacacacacccccttggtgaaagagaagacatggacaattatggctgtgactgcacattagaaattatttcactggccgggtgtggtggttcacacctgtaatccaagcactttgggaggccgaggcaggtagatcatgaggtcagaagatcaaaaccatcctggctaacacggtgaaaccccatctctactaaaaatacaaaaaattagccgggtgtggtggcacacacctgtagtcccagctactcgggaggctgaggcagaagaatcgcttgaacctgggaggtggaggttgcagtgggccaagatcgcaccactgcactccagcctgggtgacagagcgagactctgtctcaaataaataaattatttcacagaggatagcaagctccagaaggttctattacctttaaaaaagagtagttttgcccctcccagcaacctggtatgggtgccctaagaccagtctgaactcacactgtctgaaaggccacccaggatccaaatcgggccatcttcattgccatgagtgttcggacaggctctgcgtgccaggcaacagtgggcagacaaagggctccctggctactgggaagatacagaaccatcctgtgaaaatcatttcagcactggagaccttctttgctattacttctttcattaacaatgacctctaatttaaattgggccctgctggtttgttgatgaattgagcaactgagaacgtggcgggcactaaactgacagttccttccttcatggagcctgcttcatgtggaggaaacaggaaataaagcaaaagaagagggtcaggcttggtggctcatgcctataatcctggcattttaggaggctgaggttggagaatcgcttgaggccagaagtgcaagaccagcctgcgcaaacagcaagaccctgtctacaaaaaaaaaaaaaaaaaa

SEQ ID NO: 263 - DNA, 2821 bp, Homo sapiens
ccacgcgtccggtgacggacccccgccgcccgcggctcgggacccctgcctaccctccttcttgcccgccgggctgtggaactagcgcgtgccccctcgccggcctcgacgtctcccgtccgcccctcactcgtggcagggcgcagctcctggtccgtcacctgcgcgccgccccacgcggccgggctgcgggtctagggggtccgcgtctccctggctttccaagggctaatgccgtgattctagagcggctgggcgtctagggcctcgcttcaaggttactgactttttatgatgtttggtggctatgagactatagaagcatacgaagatgatctttatcgagatgagtcatctagtgaactgagtgttgatagtgaggtggaatttcaactctatagccaaattcattatgcccaagatcttgatgatgtcatcagggaggaagagcatgaagaaaagaactctgggaattcggaatcttcgagtagtaaaccaaatcagaagaagctaatcgtcctttcagatagtgaggtcatccagctgtcagatgggtcagaggtcatcactttgtctgatgaagacagtatttatagatgtaaaggaaagaatgttagagttcaagcacaagaaaatgcccatggtctttcttcttctcttcaatctaatgagctggttgataagaaatgcaagagtgatattgagaagcctaaatctgaagagagatcaggtgtaatccgagaggtcatgattatagaggtcagttcaagtgaagaggaagagagcaccatttcagaaggtgataatgtggaaagctggatgctactgggatgtgaagtagatgataaagatgatgatatccttctcaaccttgtgggatgtgaaaactctgttactgaaggagaagatggtataaactggtccatcagtgacaaagacattgaggcccagatagctaataaccgaacacctggaagatggacccagcggtactattcagccaacaaaaacattatctgtagaaattgtgacaaacgtggtcatttatcaaaaaactgccccttaccacgaaaagttcgtcgctgcttcctgtgctccaggagaggacatctcctgtattcctgtccagcccccctttgcgaatactgtcctgtgcctaagatgttggaccactcatgtcttttcagacattcctgggataaacagtgtgaccgatgtcatatgctaggccactatacagatgcttgcacagaaatctggaggcagtatcacctaacgaccaaacctggaccacccaaaaagccgaagaccccttcaagaccatcagccttagcatattgctatcactgcgcgcaaaaaggccattatggacacgaatgtccagaaagagaagtgtatgacccgtctccagtatctccattcatctgctactatgatgacaaatatgaaattcaggagagagaaaagagactaaaacaaaaaataaaagtactcaagaaaaatggggttatcccagagccatccaagctaccttatataaaagcagcaaatgagaacccccaccatgatataaggaagggccgtgcctcatggaaaagcaacaggtggcctcaagaaaataaagaaacacaaaaagaaatgaagaacaagaatagaaactgggagaagcacaggaaggctgacagacatcgtgaagtggatgaggattttcccaggggccccaaaacctactcttctcctggcagttttaaaacccagaagccttctaagccctttcaccgttcatcacattaccacacgtcaagagaagacaagtctcccaaggaaggcaagaggggcaagcagaagaaaaaggagaggtgctgggaagatgatgacaatgataacttatttcttattaagcagagaaaaaaaaagtcttaagccgtcaggcagcctctgatgtggcttttcattgttcatttggcctttgtgtctataaccttctggcactgtgtttattatctatgattaaataaagtgagtttttggttttgtttttttaatttcagccattcctagagttactgaatatccatggagatctcaattctctgtgtccaacaggatattaggtaagaaagtacaaagataaacctggacttctcctattccaatatgtcatctttactcagaatcctagggataggtagaagaattcatcttttcaagaaagtgttttaaaaatactttggaaaaaaaactgcatcaaaggtaatttatcctcaaattaaatccttgcaggaagagaaattaacactaagaaaaagtcatcaatatttttcaactttttttttttttttttttactttggaaaggacaataactataaacctatatccagattttctttctgctgaagctgttgtcagaatcttcctttggacaaaacatcactagctgactataaaaacaaaagtgtcatcattgaagccctgaagaggcagggaattgagcttcagcaaaatacaggaaaagaactatccagtataaatgtcagaagacagatttcctaaacaagtaaaagagacatcaaaaattttaacataatcacaatgaaatcattttttaccacttttacagcggtgtttcaagcggactgtcactcagatctgcagagatgaatattactcaaaaaatttttttgttctcttgcatttttttcaactaccgcaaagctatacagatttttttgtacttgtggatcttttgtacttctcataacctaatgtcagactaagaaaaataaaatatctgagagtaaaaaaaaaaaaaaaaaaaa

SEQ ID NO: 264 - DNA, 2418 bp, Homo sapiens
gtgcagaaagcaccgtcttttactagaagaagacaataaaatgttggtcaatgaactgaatcattcgaaagaaaaagaatgccaatatgaaaaagagaaagcagaaagagaagtagctgtgagacagcttcaacaaaaacgagatgatgtcttaaacaaaggatcagcaacaaaagctctgctggatgcttcatcgcgtcactgcacctatttagaaaatgggatgcaggattcaaggaagaaattagaccagatgagaagtcaatttcaagaaatacaggatcaacttacagctactataagatgtactaaggagatggatggcgacacacaaaagcttgaagtagaacatgtgatgatgagaaaaattattaaaaaacaggatgaccaaattgagcggcttgagaaaatcctgcagcattcaagtttgatgctgcaggtgtttgagagctagatgaagatatggacatttctggaattaagagccccctctacattgagcacaagacagtgacgaatccacattcttcagccagaaagtcacctctgagagccaaatgtctgactatagaaaggagagtcaaagaatgataacgacatctcaggaaaattgtgaaaataatcagcagccggatgtggataaccctttcaaatttctcctggggcctccaaccacccccactggtgttctcctgctgacagtgatttcaattttttctgggctggagctccctgatggaggggcaggccaccatctttgctgtttttgcaacttagccacttcagccttcagtctttggagtgtccaaggagaccagggggtgatgtggaccctcagcatagcacagctgctctataaagatgaggccagactgcttttttgagcactttcccaatgccattcctcctcactgggcaaaacctccaaactggggtctccagccacctcctacaggtgtgtttgggccagcaacaagttcattcatacctccctagggcaaagcttccaaagggagcggtaggctgccatctttgctgtttcacaggcttcactgatgataactccaggtactggaaaatctgaggctactagagactggagcgggccctgggcatactgcagcagccctatggaaaagtggccagactgttacctgggttcccattcctatatcttctcactaggcaagtcttgcaggcctgggcctctacctaaccccccctaccagaactgttgagccagtagcaactcagccactccctggagagagcctccaggggcaactgaaagcctctctgccactgcttctgcagtggaactgtccttgctaccctcagactgatgaaggagctaacacccttatctacaccttcaacaagctttaattgaccaaagcccatctctcatgggttctacacactccccactgctcatgacagggaacccctggattggcccccacagcacgaattctccatcctgattgctgattgcagtaaacagttgctgtattctccaggggtggtggaactctgaggagacaaacaaaagacccttggctacaaccactactaatgtcccttcctcttctgcctcaaagttaggaaagaaatataaacactgagattgccccagagctgcagtgggcagcctaggagtgccaagccatgacctacagccagcactcaagggggagagaagcacattttcagatcattgagagggaacatggctgcaactgtaaggaaacataggggagccacatgaccaagcaagagtctaccaactgaccagtaagcccaagtgccacctactggatcacatcccaaagcttcagcatcaaaaataccctactaatatactcccctctgaaaccagaaatgagaagtcagcttcaaataaagaccctgcacaaagcctcagcctggtgaaaacatccgaaaataagtctacggactgtactcaatctacactgcaattaaaggaaaacccataggtggaaatgagaagaaaccaatgcaagaactccagtaactcaaatggcctctgtgtcatatgtccttctaacaaccacaccagttctccaacaagagttcttaacctggatgaactgtctggaattacataaatataattcagaatatggataggaaaaaaaatcatcaagactcaggagaatggcaaaacccaatccaaggaaaataagaataacagtaaagtgttacaggagctgaaggataaagtagctggtataataaaaaagaacctaaccgatctgaaagcgccgaagaacacaatacaagaattccacaatgcaatcacaagtattaacagcagaaaaaaaaacctgaggaacgaatctcagaacttgaagattggttctctaaaataagatggacaaaaaaaaaaaaaaaaaa

SEQ ID NO: 265 - DNA, 3545 bp, Homo sapiens
gggcggccgggtggcggcggcggcatggcggagccgagcggggccgagacgaggccccccattcgggtcaccgtcaagacccccaaggacaaggaggaaattgtgatctgcgatcgagcctcggtcaaggagttcaaagaggaaatctcccggaggtttaaggctcagcaggatcagctggtcctgatcttcgcaggcaagatcctcaaggatggggacacactgaaccagcacggaatcaaggacgggctcactgtccatctggtcatcaagacccctcagaaggctcaagatccagctgctgccactgcttcttccccctccacacctgaccctgcctcagcaccctccaccacgcctgcttcacccgccacccctgcccagccctccacctctggcagtgcctcttcagatgctggcagtggaagccggaggagcagtggtggggggccctctccgggggctggggagggatcccccagtgctactgcgtccatactctctggctttgggggcatcctggggctgggcagcctaggcctgggctctgccaacttcatggagctgcagcagcagatgcagcggcagctgatgtccaatcctgagatgctgtcacagatcatggagaaccccctggtccaggatatgatgtctaaccctgatctgatgcgtcacatgattatggccaacccccagatgcagcagttgatggagcggaaccctgagatcagccacatgctcaataaccctgaactcatgaggcagacaatggagcttgctcggaatccagccatgatgcaagagatgatgcggaaccaggaccgggccctgagcaaccttgagagcatccctggagggtataatgccctccgccgcatgtacacggacatccaggagcccatgttcagtgctgcccgggaacagtttggcaacaatcccttctcttccctggccgggaactccgacagctcatcctcccagcctctgcggactgagaatcgagagcccctccctaacccctggagcccctcgccccccacctcccaggcccccgggtccggtggggagggcaccggaggatcggggaccagccaggtgcacccgacagtctcgaacccctttgggatcaatgcggctagcctggggtcagggatgttcaatagcccagaaatgcaagccctcctccagcagatctctgagaacccccagctgatgcagaatgtgatctcagcaccctacatgcgcagcatgatgcagacgcttgcccagaaccccgactttgctgctcagatgatggtgaatgtgccgctcttcgcggggaacccccaactgcaggagcagctccgcctgcagctcccagtcttcctgcagcagatgcagaacccagagtcactctccatccttaccaatccccgagccatgcaggcattgctgcagatccagcagggactacagaccttgcagaccgaggcccctgggctggtacccagccttggctcctttgggatatcccggaccccagcaccctcagcaggcagcaacgcagggtctacgcccgaggcccccacttcctcaccagccacgccagccacatcttctccaacaggggcttccagcgcccagcagcaactcatgcagcagatgatccagcttttggctggaagtggaaactcacaggtgcagacgccagaagtgagatttcagcagcagctggagcagctcaactccatgggcttcatcaatcgtgaggctaacctgcaggccctgattgccacaggaggggacatcaacgcagctatcgagagactgctgggctcccagctctcctaatccctcggcccatgcctcctgcctctcccctccctcgatgtcagcattcggttcttctgtcaatccttaccctctgcagcttgtcctcccttccgtcttctccctcatcctttccaaacagcagggtgactttagaggcatgggctccaaccccttagctctgtctgagaattatggttttactgctacgtctctaacagactcttctctcctggtctccttgagcagtgctacttaaacagttttcacagtttcattgattgactctacctccttgccccacaccacttttgcaatctttaaactttcagtggctgtgcagagtcgagggaggaaccagctctctggtttactggaacatagtcttccatctataccactagggttttgtcttatgtttacttttggtaactctcttccttctttttctccctaccccccaacccctagcccaaccaatgctagaatttcttgctctgaaggaggagcaggtgaaacaggtggtaattttccttctcggcccctattctggttcattcagcactttttggtgggaactgttggaaattccagggtaaggaggaagatgcctgttctccctgtctgaagagggagatgagacagctctctggacaggaattaacaaacgctggagcagcccagaggaaattcgtgtgaaagaggagggaatgagattattcggaggaagggaatgggggagacagcctgagtaaaaggcttggaagttggaattagcagtggggagcagaagcactcatagctcttttaggcagaagaatccaggcccgagctggcagaagagacttagagatgctaatggaatttaaactgaaaaaaggagcccaatgaagctaagcgccacgccccacaaggggtcatattggctttagttcctcaagcatatgtgcttatatgcacacacacacacatttccatggacccaggtcttgcttgtgtccccaggcaccagtagtttgagcccccctcaaaagacatgaagggggttggggtctgtgtgagtagtggggaggtgcatgtgtatccacatgtgtgcatacactcttaagttgggtgggaagtggattccttgttggtttctggttcagagtgctctcccaccaccagagacaagtgggtaaaaaggtcagtccattgcaggaatatatatccgggagagctaggtcccttggggctctggatgctgggtaacccagaggtaatgtgggtaccctttctgaagctgtcagggctgtgactagcacccttatcacccctcactgccttgtgggaatagtagagggtttttttcctccagagcccctggcctttcagttcttaactatttccctccaggccagaaagttttctttgaggaaggagaggagagggtggcaatgatgcctttgatctggaattggacatttctctgtcagagcacagaggaggctcatatcacctcttccctctcctacttggcccagctgcttggaggaccgaccccatggctgagaatatgacggcaagaggaacagagtttgctccaagtgggaaagggtcccaagcagtccagagaagatgtctgtgtggctttccctccctgcctcccccagctcccacactggcctttgtaaataaatggcgtggtctttgttgtgaaaaaaaaaaaaaaaaaaaaaaaaaaaaaaaaaaaaaaa

SEQ ID NO: 266 - DNA, 845 bp, Homo sapiens
ggggggcatcagcgatggcggctgcgtcggggtcggttctgcagcgctgtatcgtgtcgccggcagggaggcatagcgcctctctgatcttcctgcatggctcaggtgattctggacaaggattaagaatgtggatcaagcaggttttaaatcaagatttaacattccaacacataaaaattatttatccaacagctcctcccagatcatatactcctatgaaaggaggaatctccaatgtatggtttgacagatttaaaataaccaatgactgcccagaacaccttgaatcaattgatgtcatgtgtcaagtgcttactgatttgattgatgaagaagtaaaaagtggcatcaagaagaacaggatattaataggaggattctctatgggaggatgcatggcaatgcatttagcatatagaaatcatcaagatgtggcaggagtatttgctctttctagttttctgaataaagcatctgctgtttaccaggctcttcagaagagtaatggtgtacttcctgaattatttcagtgtcatggtactgcagatgagttagttcttcattcttgggcagaagagacaaactcaatgttaaaatctctaggagtgaccacgaagtttcatagttttccaaatgtttaccatgagctaagcaaaactgagttagacatattgaagttatggattcttacaaagctgccaggagaaatggaaaaacaaaaatgaatgaatcaagagtgatttgttaatgtaagtgtaatgtctttgtgaaaagtgatttttactgccaaattataatgataattaaaatattaaaaaaaaaaaaaaaaaaaaaaaaaaaaa

SEQ ID NO: 267 - DNA, 3668 bp, Homo sapiens; identical to SEQ ID NO: 4

SEQ ID NO: 268 - DNA, 2575 bp, Homo sapiens
gcatggccaaggccgggcggccgccttgcccccgcttcctttcacgctgtcgctgcccgtaggtggttgtggccactgtgcccggagggaggcggcggtggccagtaatgcctgggaaactcctctggggggacattatggagctggaagcacccttggaggagtccgagagccagaagaaggagaggcaaaagagtgacagaaggaagtcaaggcaccattatgactcggatgagaaatcagaaacaagagaaaatggtgttacagatgacctggatgctcccaaggccaaaaaatctaaaatgaaagagaagctaaatggagacactgaagaaggatttaatagactttcagatgaattctccaaatctcataagtcaagaagaaaagatctaccaaatggagatatagatgaatatgaaaaaaaatcaaagcgagtatcatctttagatacttctactcataaatcaagtgataataaactagaggagaccttaacacgtgaacagaaagaaggagccttctccaattttcctatttctgaagagactataaagcttctgaaaggtcgaggggtaacatatctctttcctattcaagttaagacctttggtcctgtatatgaaggaaaagatttaatagctcaagcacggacaggaacaggaaagacattctcttttgccatccccttaattgaaagactccaaagaaatcaagaaacaattaaaaaaagccgctcaccaaaggtacttgttttggctccaacaagggaactggcaaaccaagtagccaaagacttcaaagatataactaggaaactcagcgtggcgtgtttttatggtggaacatcatatcaaagccaaattaatcatattcgaaatggtattgacatcttggttggaacacctggtcgtatcaaagaccatctgcagagtggccgattggatctttctaaactgcgacatgttgtgcttgatgaagtggatcagatgttagatttaggtttcgctgaacaagttgaagatattattcatgaatcctacaaaactgattctgaagacaatcctcagactttacttttttctgcaacttgcccacagtgggtatacaaagttgcaaaaaaatacatgaaatccagatatgaacaggttgaccttgttggaaaaatgactcaaaaggctgcaactactgtggaacatttggccatccagtgtcattggtctcagaggccagcagttattggagatgtccttcaagtctacagtgggtctgaagggagggctattattttctgtgagaccaagaagaatgtaactgaaatggccatgaatccacacataaaacagaatgcccagtgtttacatggggacattgcacagtcacaaagagaaattacactaaaaggcttcagagaaggtagttttaaagttttggtggcaaccaatgtggctgcccgtggtttggacattcctgaagttgacctggtgattcaaagttctcctcctcaggatgttgagtcctatatccatcgctctggacgcacaggtagagctggacggacagggatttgtatatgtttttatcaaccaagagaaagaggtcaactaagatatgtggaacaaaaagcaggaattacttttaaacgtgtaggtgttccttctacaatggatttagttaaatctaaaagcatggatgccatcaggtctctggcttccgtttcttatgctgctgttgattttttccgaccatcagctcagagactgatagaagagaaaggtgcagtggatgcattggctgcagctttagcccacatttctggtgcatcaagctttgaaccacgatctttgatcacctctgataaggggtttgtgaccatgactctggaaagcctagaggaaatacaggatgtcagctgtgcttggaaagaacttaacagaaagctgagtagtaatgcagtgtctcagattaccagaatgtgcctcctgaaaggaaatatgggtgtttgctttgatgttcctacaactgagtcagaaaggttacaggcagagtggcatgattccgactggatactctcagtgccagccaaattacctgaaattgaagaatattatgatggaaacacatcttctaattccagacagaggagtggctggtcaagtggtcgatcaggccggtcaggccggtcaggtggtcgatctggcggccggtcaggtagacagagtcgacaaggaagtcgctcaggaagtcgacaagatggtagaagacgaagtgggaatagaaatcgatcaagaagtgggggccacaaacggagttttgactgagtatttgatagttaatctaccagtgtgagcttgcctatttctgcctaatcatgtacattatccaccaaaaattaggtcatcatagttgaggtatgtgtctgctatttgcaaagaagttggtcgtatttttttaaaaagtatttcacaagaatggaacaaatctacttatccagttatacctttgaataaaaaaacctccttttattgtctcttttcaaaaaaaaaaaaaaaaaaaaaaaaaaaaaaaaaaaaaa

SEQ ID NO: 269 - DNA, 1679 bp, Homo sapiens
gaaaggcagggaggggaggttgtcccctgctgagaaccattggtttaaggttaatctggctctgctttcatagactactctgttacccaggctggagtgcggtgatgagtgatcatagctcactgcagccttaaactctagtgatcctcccgccttggccttccaaagtgctgagattacagatgtgaaccaccacacccagcccagtcaatttgtttttagaatgttcccaagaatatagttatgttgctaaataagatactaaaataatcccatactatatttcttgacagaaaaactattaaaatgtatacatgataaaaatttcttttatgaagcaaaatatgttttgttttgctcatgaacgtgaggtattttggaaaaatggtaaagaagtgcagagtcaagtcatagcgactaataatgggttattttcttaaattgtatgcttatgttaattctcacagtctttttgtttgggtctgtgacagatcttacaaaagatcttttagacctatgattcttaacaaaattaaagaattaagtcggaaccaattttccacaatgtctcatctaagaaaggactcacagcccagcagcccaggagatgacgcaatggacaggagtgggctccctgaccttcaaggaagatttgagctatctgggaaaaacagacagtatccactggatgcattggaaccccaacccagcattggggatattaaggacattaaaaaagcagccaagtctatgctagacccagcacataaatctcatttccaccctgtgaccccaagtttagtattcttgtgtttcatatttgatgggttacaccaggcattactgagtgttggtgtgagcaagaggtctaatactgtggttgggaatgagaacgaggaaaggggtactccttatgctagcagattcaaagatatgcctaactttattgcccttgagaagtcatcagttctccgccactgctgtgaccttttgataggcattgcggctggatcaagtgataagatttgcaccagcagtctccaagttcagagacgattcaaggcaatgatggcatctattggaagactttcacatggtgagagtgctgatctgctaatcagctgcaatgcagaatcagccataggttggatcagctcaagaccgtgggttggagaattaatgttcacacttctatttggagactttgaatcccctctacacaagctacgcaagtcaagttagttgccaagaaagcacagatgacaacctattaatgctgtgagaatgtttctagatcagtgcatggatggctccattgctctacgggccattgtgtctgagatcccagtctttgaggagaaaaaaaacaatggttaaaaaggcattggggaaatattttgagtttgggggtgtactttgccaccccattattggggagctgtcaccacgaatgttcccaaacttagcaacagcggcaaactactgggccaagatgagcaaccccacatttttgggatttaaagctcctgatgttataccaggatcaaccatcacactccctttgcttcaaatggcatctaccccgtaagatcttgaggggggagtgttgggtggaatcatagatccatgcactcctaacatgaactaattctcattatttaaaaaaaaaaaaaaaaaaa

SEQ ID NO: 270 - DNA, 3639 bp, Homo sapiens
gcggcgctgggtcggtggcggaggctgaggagaaggaggagcgggccgtggaggcttcgccgcctaggtactgctataaccagaatttggtagaaaaaggatttacttgttggggccctcttgataaaaagagatgtggggggattctcgacctgctaacagaactggaccttttcgtgggagccaagaagaaaggtttgctcccgggtggaacagggattatcctcctcctccccttaagagtcatgctcaagagagacactctggcaactttcctggcagagattcacttccctttgatttccaggggcattcggggcctccttttgcaaatgtagaggagcattctttcagctatggagctagagacggaccgcatggtgactatcgaggaggggagggacctggacatgatttcagggggggagatttttcgtcttctgatttccagagcagagattcatcacagttggacttcaggggtagggacatacattctggggattttcgggatagagaaggaccacctatggactataggggtggagatggtacttctatggattatagaggtagggaggcacctcatatgaactacagagacagggatgctcacgctgttgacttcagaggtagggatgctcctccatctgacttcaggggccggggcacttatgatttagattttagaggccgggatggatcccatgcagattttaggggaagggatttatcagatttggattttagggccagagaacagtcccgttctgattttaggaatagagatgtatctgatttggactttagagacaaagacggaacacaagtagactttagaggccgaggttcaggtactactgatctagactttagggacagggatacgccacattcagatttcagaggtagacaccgatctaggactgatcaggattttaggggcagagagatgggatcttgtatggaatttaaagatagggagatgccccctgtggatccaaatattttggattacattcagccctctacacaagatagagaacattctggtatgaatgtgaacaggagagaagaatccacacatgaccatacgatagaaaggcctgcttttggcattcagaagggagaatttgagcattcagaaacaagagaaggagaaacacaaggtgtagcctttgaacatgagtctccagcagactttcagaacagccaaagtccagttcaagaccaagataagtcacagctttctggacgtgaagagcagagttcagatgctggtctgtttaaagaagaaggcggtctggactttcttgggcggcaagacaccgattacagaagcatggagtaccgtgatgtggatcataggctgccaggaagccagatgtttggctatggccagagcaagtcttttccagagggcaaaactgcccgagatgcccaacgggaccttcaggatcaagattataggaccggcccaagtgaggagaaacccagcaggcttattcgattaagtggggtacctgaagatgccacaaaagaagagattcttaatgcttttcggactcctgatggcatgcctgtaaagaacttgcagttgaaggagtataacacaggttacgactatggctatgtctgcgtggagttttcactcttggaagatgccatcggatgcatggaggccaaccagggaactctaatgatccaggacaaagaagttaccctggagtatgtatcaagcctggatttttggtactgcaaacgatgtaaggcaaacattggtgggcaccgatcttcctgttcattctgcaagaacccaagagaagtgacagaggccaagcaagaattaataacctaccctcagcctcagaaaacatccataccagcaccattggaaaaacagcccaaccagcccctaagaccagctgataaggaacctgaacccaggaagagggaagaaggccaagagtcacgcttaggacatcaaaagagagaagcagaaaggtatctgcctccttctcgaagggaagggccaactttccgaagagaccgagagagggagtcatggtctggagagacacgccaggatggagagagcaaaactatcatgctaaagcgtatctatcgttccacaccacctgaggtgatagtggaagtgctggagccctatgtccgccttactactgccaacgtccgtatcatcaagaacagaacaggccctatggggcatacctatggctttattgacctcgactcccatgcggaagctcttcgtgtggtgaagatcttacagaaccttgatccgccatttagcattgatgggaagatggtagctgtaaacctggccactggaaaacgaagaaatgattctggggaccattctgaccacatgcattactatcagggtaaaaaatatttccgagataggaggggaggtggcagaaattcagactggtcttcagatacaaatcgacaaggacaacagtcatcatctgactgctacatatatgattctgctactggctactattatgaccccttggcaggaacttattatgaccccaatacccagcaagaagtctatgtgccccaggatcctggattacctgaggaagaagagatcaaggaaaaaaaacccaccagtcaaggaaagtcaagtagcaagaaggaaatgtctaaaagagatggcaaggagaaaaaagacagaggagtgacgaggtttcaggaaaatgccagtgaagggaaggcccctgcagaagacgtctttaagaagcccctgcctcctactgtgaagaaggaagagagtccccctccacctaaagtggtaaacccactgatcggcctcttgggtgaatatggaggagacagtgactatgaggaggaagaagaggaggaacagacccctcccccacagccccgcacagcacagccccagaagcgagaggagcaaaccaagaaggagaatgaagaagacaaactcactgactggaataaactggcttgtctgctttgcagaaggcagtttcccaataaagaagttctgatcaaacaccagcagctgtcagacctgcacaagcaaaacctggaaatccaccggaagataaaacagtctgagcaggagctagcctatctggaaaggagagaacgagagggaaagtttaaaggaagaggaaatgatcgcagggaaaagctccagtcttttgactctccagaaaggaaacggattaagtactccagggaaactgacagtgatcgtaaacttgttgataaagaagatatcgacactagcagcaaaggaggctgtgtccaacaggctactggctggaggaaagggacaggcctgggatatggccatcctggattggcttcatcagaggaggctgaaggccggatgaggggccccagtgttggagcctcaggaagaaccagcaaaagacagtccaacgagacttatcgagatgctgttcgaagagtcatgtttgctcgatataaagaactcgattaagaaaggagacaagttccatgggatacaacctccctcttgttttgtttgtctctccttttcttttgttactgttcttgctgctagaacttttttaaataaactttttttcaatgtgaaaaaaaaaaaaaaaaaaa

SEQ ID NO: 271 - DNA, 3983 bp, Homo sapiens
ggtagtaacttgcagtttcagagcacatgcacactgtcagggctagcctgcctgcttacgcgcgctgcggattgttgctccgttgtacctgctggggaattcacctcgttactgctcgatatcttccaccccttacaaaatcagaaaagttgtgttttctaataccaaagaggaggtttggctttctgtgggtgattcccagacactgaagtgcaaagaagagaccctcctagaaaagtaaaatatgactaaaagcaatggagaagagcccaagatggggggcaggatggagagattccagcagggagtcagtaaacgcacacttttggccaagaagaaagtgcagaacattacaaaggaggatgttaaaagttacctgtttcggaatgcttttgtgctgctcacagtcaccgctgtcattgtgggtacaatccttggatttaccctccgaccatacagaatgagctaccgggaagtcaagtacttctcctttcctggggaacttctgatgaggatgttacagatgctggtcttaccacttatcatctccagtcttgtcacaggaatggcggcgctagatagtaaggcatcagggaagatgggaatgcgagctgtagtctattatatgactaccaccatcattgctgtggtgattggcataatcattgtcatcatcatccatcctgggaagggcacaaaggaaaacatgcacagagaaggcaaaattgtacgagtgacagctgcagatgccttcctggacttgatcaggaacatgttccctccaaatctggtagaagcctgctttaaacagtttaaaaccaactatgagaagagaagctttaaagtgcccatccaggccaacgaaacgcttgtgggtgctgtgataaacaatgtgtctgaggccatggagactcttacccgaatcacagaggagctggtcccagttccaggatctgtgaatggagtcaatgccctgggtctagttgtcttctccatgtgcttcggttttgtgattggaaacatgaaggaacaggggcaggccctgagagagttctttgattctcttaacgaagccatcatgagactggtagcagtaataatgtggtatgcccccgtgggtattctcttcctgattgctgggaagattgtggagatggaagacatgggtgtgattggggggcagcttgccatgtacaccgtgactgtcattgttggcttactcattcacgcagtcatcgtcttgccactcctctacttcttggtaacacggaaaaacccttgggtttttattggagggttgctgcaagcactcatcaccgctctggggacctcttcaagttctgccaccctacccatcaccttcaagtgcctggaagagaacaatggcgtggacaagcgcgtcaccagattcgtgctccccgtaggagccaccattaacatggatgggactgccctctatgaggctttggctgccattttcattgctcaagttaacaactttgaactgaacttcggacaaattattacaatcagcatcacagccacagctgccagtattggggcagctggaattcctcaggcgggcctggtcactatggtcattgtgctgacatctgtcggcctgcccactgacgacatcacgctcatcatcgcggtggactggttcctggatcgcctccggaccaccacaaacgtactgggagactccctgggagctgggattgtggagcacttgtcacgacatgaactgaagaacagagatgttgaaatgggtaactcagtgattgaagagaatgaaatgaagaaaccatatcaactgattgcacaggacaatgaaactgagaaacccatcgacagtgaaaccaagatgtagactaacataaagaaacactttcttgagcaccaggtgttaaaaaccattataaaatctttccatctcattacagctcattcgctccagcaagcccgtcatcttccctttcctcccttctgataagactggaaaatagtcctccaaaacacaagggaggattttgggtggccaaagtgtacaattttcatcccacaattgaaatttttaaatcatttcatgttagtcttaccgaataaggtaccaagatcacaaatagtgttgatcagatcttacaagtttatgtggcacacaatcctataaatgtgatttttttatataagttaaagagacaaatagtaggctaaaaacattttaaaatcaacttttgaaatttaaaaatctttcagaatacaattcagttttagtttcaaaatgttaacaacttgaattacaaccggttatcagttggacagtaagattttatccctttctcttctgactggtatacctatttcattagtagctaggtgcacatatacatctagcacagctgtgaggacagacagaaggcaaagtttccatgtggccttgagcaagtcccatctcacctctaggcctcagtgtcctcatctataaaatgagggacttccctagaagtcttcatggtctcttccagcccagacatcctgtgatgtcatgaaagcacctgccctctgtttcccctcagaacaccctgtaccatccatggagcacgaggccttcagaaaagacacttcaatgggagtgaacatttctaactaaggacaggatggctgtgtgtggtggtcaccaggtcctgtgagcaaagtgcaggttatgcaagtcgccaggcaggaggccattccaggagtgggattattcatcaaactctttgcccagttcatcccaatgggggaagtattcccttctttcctactctgggaagaatgtctcctgccactcctcaactgatgatagacttcgaaaacagatgagaagactagcagctagcaagggtgcttgtagtcacactgtggaacactaaagagctaggaaagagttgagcacaggcaacattacaaacaaaggatttgaaaacaccaagagtacaggtcttctttaaggaagaataaaaaagaagaggttcatttttctggctttttttttcacctgaaacactttttctcgagtccaaaatcattccccccgtgaagtctgcttaccaaaacataagacgacttatatatttgaaagaagtcaaatgaatgagctctctaatagaagtccatgagttgagtgggtatttcttatttgaaagtgtttttctttaatcaaaagtccttagaatgagggaaacaaaatatttatttgttttggaatcccacttatcaaatcattcaaaactttcagctggagtggggtttgcttttgttttgtttgtgtccataagagaaatggtagaagatgaatcagtatgaagacactgtcaatgaggttatgagaaaaacagcaggggcattagtttcaggcaaggcagctcccaggtttagagattaatttttaccccctaaggaatatccagtcaaagacgctgagtgggagctgtcaggcagtagcagctgtgtttgagtttctggctgaaaatggtgaagaatggacttaatcatgctaacaaactgaaaaatctagacatagatcctctgatatacaattagagatatttttatatagaccccaagcattctgtgcataaaagttaacattaggctgtggtgcagtaaccatttaatgtcgaggctctatttcggaaatacactacaaatgttaaagtacgtggctgtcctcttaagacactagtagagcaaagacttaatcatatcaacttaattctgttacacaatatgtgtttttttaatatactaaccatttcttatggaaaggtcctgtggggagcccatcatctcgccaagccatcacaggctctgcatacacatgcactcagtgtggactgggaagcattactttgtagatgtattttcaataaagaaaaaaatagttttacattaaaaaaaaaaaaaaaaaaaaaaaaaaaaaaagaaaaaaaaaaaaaaaa

SEQ ID NO: 272 - DNA, 13671 bp, Homo sapiens
atgaaagtagacaggactaaactgaagaagacacctactgaggctcctgcagactgcagagccttaatagacaaactcaaagtttgtaatgatgagcaacttctcttggaactgcagcagatcaaaacatggaacattggaaagtgcgagttatatcactgggtggacctgttggaccgcttcgatggaatactggcagatgctggacagacagtggagaatatgtcatggatgctcgtatgtgataggccagaaagagagcaactgaaaatgcttctcttggctgtgttgaacttcacagccttgctcattgagtacagcttttcccggcatctgtacagttccatagagcatttgacaactttattggcttcctctgatatgcaagtggtgctggcagtcctcaatctcctatatgtatttagcaaaagatcaaactacatcactcgtctgggatctgacaagaggaccccgctgctaactcggctacaacatttggcagagagctggggtggaaaggagaatggctttggacttgcagaatgttgcagagacttgcatatgatgaaatatccacccagtgcaactacactacactttgaattctatgcagatcctggggccgaggtcaaaattgagaaaaggacaactagtaacacactacattatattcacatagagcaacttgacaagatttcagaaagcccttctgaaatcatggaatctcttaccaaaatgtacagcattcctaaggataagcagatgctgttatttacacacatacgactggcccatggcttttctaatcacaggaagcgattgcaggcagttcaggccagactgcatgcaatatctatattagtgtattccaatgccttgcaggaatcagcaaacagtatcttgtataatggcttgatagaggagttggtagatgtccttcagataacggataagcagcttatggagattaaagcagcttctttacgaacattaacatcaattgtccacttggagagaactcccaaactcagcagtattattgactgtactggaactgcctcctaccatggatttttgccagtgcttgtaaggaactgtatccaggccatgattgatccttccatggatccataccctcaccagtttgccactgctctcttctcttttttataccatctggccagctacgatgctggtggtgaagccttggtctcctgtggaatgatggaagccttattgaaggtcataaagtttcttggcgatgaacaggaccagataacatttgtcaccagagccgtcagagtggttgaccttatcaccaacctggatatggcagcttttcaatcccatagtggactttctatcttcatttatagacttgagcatgaagtagatttgtgccgaaaagaatgtccgtttgtgatcaagccaaagatccagagacccaatactacacaagaaggagaggaaatggaaactgatatggatggagtccagtgtattccacaacgagcagcacttctgaaatccatgttgaatttcctcaagaaggccatccaagaccctgctttctcagatggcatacgacatgtgatggatggttctctgcctacctccctgaaacacatcatcagcaatgcagaatactatggcccatcactcttcctcctagctactgaagtggtgactgtgtttgtatttcaagaaccatcactgctctcctcactccaggacaatggattgacagatgtcatgctgcatgcactgcttatcaaagatgttcctgctacccgtgaagtccttggctccctcccaaatgtattcagtgcactctgtttgaatgcccgaggtcttcagtcttttgttcagtgtcagccttttgaacgcctcttcaaagttcttctgtctccagattacctcccagccatgcggaggaggagaagttctgatccccttggggatactgcatccaacctggggagtgctgtcgatgagctcatgagacatcagcccacccttaaaacagatgcaacgactgccatcatcaagttacttgaagaaatctgtaatcttggaagggaccccaaatacatctgtcagaagccatcaatccagaaggcagatggcactgccactgctcctcccccaaggtctaatcatgccgcagaagaagcctctagtgaggatgaggaggaagaggaagtacaggccatgcagagctttaattctacccagcaaaatgaaactgagcctaatcagcaggttgttggtacagaggaacgtattcctattcccctcatggattacatccttaatgtgatgaaatttgtggaatctattctgagcaacaatacaacagatgaccactgccaggaatttgtgaatcagaaaggactgttgcctttggttaccattttgggtcttcccaatctgcccattgactttcccacatctgctgcctgtcaggctgttgcaggtgtctgcaaatccatattgacactgtcacatgaacccaaagtccttcaagagggtctccttcagttggactccatcctctcctccctggagcccttacaccgccccattgaatcccctgggggctcagtgttgttgcgagaactggcttgcgcaggcaatgttgctgatgctaccctctcagcccaggccacacctctgctgcatgcactcactgctgcccatgcctacatcatgatgtttgttcatacttgcagagttggacagagtgaaattcgttccatctccgtaaaccagtggggctctcaattgggtctgagtgttttgagcaagctgagccagttatactgttccctggtgtgggaaagcactgtcctcctctctctgtgtaccccaaacagcctaccatctgggtgtgaatttggccaggcagatatgcagaaactggttccaaaggatgagaaggcaggtacgacccagggcggaaaaagatcagatggggaacaggatggagcagctggaagtatggatgcttctacccagggcttattagaaggcattgggctagatggtgacacattggctcccatggagacagatgaacctactgcttcagactctaagggcaaatctaaaatcacaccagcaatggctgccagaattaagcaaatcaagcctttgttatcagcttcctccagattaggccgagcacttgctgagctatttggacttcttgttaaactttgtgtgggatctcctgtccgccagagaaggagccatcatgctgccagcaccactacagcaccgacacctgccgcgcgatcaacagcctcagctctcactaagctcttgactaaggggttatcttggcagcccccaccatatacacctactccccgattcaggctgacattcttcatctgttcagttggtttcacatccccaatgctgtttgatgagaggaagtatccctaccacctcatgctgcaaaaatttctctgctccggaggccacaatgctctttttgaaactttcaactgggctctgtccatgggaggtaaagttcctgtttctgagggattggaacactcagacttgcctgatggcacaggagaattcctagatgcctggcttatgctggtggagaagatggtgaatcccaccacggtgcttgaatctccacattcgctgcctgccaaattgcctggaggtgtccagaactttccccagttcagtgcactgcgcttccttgtggtaactcagaaagcagcctttacttgcatcaaaaacttatggaaccggaaacccctgaaggtatatggtggacgaatggctgaatcgatgctggccattctatgccacatcctccgaggagaacctgtgattcgagagagactaagcaaggagaaggaggggtctcgaggagaagaggatacagggcaagaggaaggtggctcccgccgggaacctcaagtcaaccagcaacaactgcaacagctcatggacatgggcttcacaagggaacatgcaatggaggcactgttgaacaccagcaccatggagcaggccacagagtaccttttaacccaccctcctccaatcatgggaggagttgttcgggatctcagcatgtctgaagaggaccagatgatgagagcaattgctatgtctctgggacaggatattccaatggatcaaagggcagagtcacctgaggaagttgcttgccggaaggaggaagaggaacggaaagctcgggaaaagcaggaggaggaagaggctaaatgtctagagaagttccaggatgctgacccgttggaacaagatgagctccacactttcacagatactatgttgccaggctgcttccaccttcttgatgagctgccagacacagtataccgtgtgtgtgacctgatcatgacagcaatcaaacgtaatggagcagattatcgtgacatgattctgaagcaagtagtcaatcaggtgtgggaagctgctgatgtattgatcaaagctgctcttcccctgacaacaagtgacacaaaaaccgtgtcagagtggataagtcagatggccacactgccccaggcctccaatttggctactagaatcttgcttttaacgctactttttgaggagttgaagctaccttgtgcttgggtggttgaatcaagtggcatccttaatgtcctaatcaaactcttggaagtggttcagccctgcctccaggcagccaaggagcagaaggaagtccagaccccaaagtggatcacaccagtgttgctcctgattgatttctatgaaaagacagccatctcctcaaaaaggagagcccagatgactaagtacctgcaatccaacagcaacaactggcgctggtttgatgatcgctctgggcgttggtgtagttacagtgcaagcaacaatagcactattgattctgcctggaaatctggagagacaagcgtgcgattcactgcaggccgaagaagatacacggtccaattcactacaatggtgcaggttaatgaggaaacagggaaccgacgccctgtgatgctgactctcctcagggtacctcggctgaataaaaattcaaaaaacagcaatggacaggaactagagaagacgctggaagaaagcaaagaaatggatatcaaacgtaaagaaaataaaggcaatgatacccctttggccctagagagtacaaacactgaaaaggagacaagcctggaggaaacaaaaatcggggagatcctgatccagggcttgacagaagatatggtgactgttttaatccgggcctgcgtgagcatgctgggagtccctgtggacccagatactttgcatgccacccttcgtctctgtctgaggctcacccgggaccacaaatatgccatgatgtttgcagaactgaagagtacccgcatgatcttgaatttgacccagagctcaggcttcaatgggtttactcccctggtcacccttctcttaagacacatcattgaggacccctgtacccttcgtcataccatggaaaaggttgttcgctcagcagctacaagtggagctggtagcactacctctggtgttgtgtctggcagcctcggctctcgggagatcaactacatccttcgtgtccttgggccagccgcatgccgcaatccagacatattcacagaagtggccaactgctgtatccgcatcgcccttcctgcccctcgaggctcaggaactgcttcagatgatgaatttgagaatcttagaattaaaggccctaatgctgtacagctggtgaagaccacccctttgaagccctcacctctgcctgtcatccctgatactatcaaggaagtgatctatgatatgctgaatgctctggctgcataccatgctccagaggaagcagataaatctgatcctaaacctggggttatgacccaagaggttggccagctcctgcaagacatgggtgatgatgtataccagcagtaccggtcacttacgcgtcagagcagtgactttgatacgcagtcaggtttttccattaatagtcaggtctttgctgcagatggtgcctccactgagacttccgcatctgggacctcccaaggagaggcttcaactccagaggagtctcgagatgggaagaaagataaagaaggggaccgggcctctgaggaaggcaaacagaaaggcaagggcagcaaacctttaatgcctacctccactatccttcgtcttctggcagagttggtgaggtcctatgttggtattgctaccctgattgccaactacagctacactgtgggccagtctgaactgatcaaagaggactgcagtgtgctagcttttgttctggaccacctgctcccacatacccagaatgcagaagacaaggacacccctgccttggcccgcctgttcctcgcaagcctggctgctgcagggagtggcacagatgcccaggtggccctagtgaatgaagtaaaagcagcccttggacgggcactggctatggctgagagtacagagaaacatgccaggcttcaggcagtgatgtgtatcatcagtactatcatggagtcctgcccctccacctccagcttctacagcagtgccacagcgaagacccagcacaatggcatgaacaacatcattcggcttttcctgaagaagggactggttaatgacctggccagagtacctcacagcttagacctgtccagtcccaacatggccaacacagtcaatgctgctctgaagcctttggaaacactttcccggattgtgaaccagcccagtagcctttttggcagcaagagtgcttctagcaagaacaagtctgagcaggatgcccaaggagcctctcaagattccagtagcaaccagcaggacccaggcgagcctggggaagcagaagtgcaggaggaggatcatgatgtcactcagacagaggtggcagatggggatatcatggatggggaggctgaaaccgactcagtggtgattgctgggcagcctgaggtgctcagttcacaagagatgcaggttgagaatgagctggaggacctgatagatgagttgcttgagagggatggcggatctgggaacagtacaattatagtgagcagaagtggagaggatgaatcacaagaggacgtgctgatggatgaagctccttccaacctcagccaagcttccaccttgcaggccaaccgagaagattccatgaatatcctggaccctgaggatgaggaggagcacactcaggaagaggacagcagtggcagtaacgaggatgaggatgatagtcaggatgaagaggaggaggaggaggaagatgaggaagatgatcaggaggatgatgaaggtgaagagggagatgaagacgatgacgacgatggctctgagatggaattggatgaggattatcctgatatgaacgcttctcccttggtccgatttgagcgctttgaccgggaggatgatctcatcattgagtttgacaacatgttctccagtgctacagacatccccccatccccaggaaatatccctaccacccatccactgatggtgcgccatgcagaccacagttctctgacactgggcagtggctcttcaacaactcgtctcacccagggcatcgggcgcagtcagaggaccctaaggcagctgacggccaatactggccacaccattcatgttcactaccctgggaatcgccagcccaaccctcctcttatactgcagaggttgcttggtccctcagctgctgctgacatccttcagctgagcagcagccttcccctacaaagccggggtcgggcccgcctcctggtaggcaacgatgacgtccacatcatcgcccgttctgatgatgagctgctggatgactttttccatgatcagagcacagctaccagccaagcaggaaccctgtccagcatccccacagccctgacccgctggacagaagaatgcaaagttctcgatgctgagagcatgcatgactgtgtttcagtggttaaagtgtccattgtcaatcacctggaattcctgagggatgaggagctggaagaaaggcgagagaagcgcaggaaacaactggctgaggaagaaacaaagataactgataaaggcaaagaagataaggagaacagggatcagagtgcacagtgtactgcatctaagtcaaatgactccactgaacagaatctctcagatgggacgcctatgcctgacagctacccaacaaccccatcttcaactgatgcagctacatctgagtccaaggagacccttggcactctgcaatcctcacaacagcaaccaacactcccaaccccaccagctttgggagaggttcctcaggagctgcagtctccagctggagaagggggcagctctacacagctattgatgcctgtagagccagaggaattgggtcccacaaggccaagtggggaagcagaaacaactcagatggagttatccccagctcccactataacctcactttccccagagagagctgaggattctgatgcactgacggctgtcagcagtcagctagaaggctctcctatggatacaagcagcctggcttcctgtaccttagaggaggctgtgggtgacacttcagcagctggcagttctgagcagcccagagcaggcagctccactcctggggatgccccaccagctgtggcggaagtgcaaggcaggagtgatgggtcaggggaatctgcccagccacctgaggacagctccccacctgcatcctctgagagctcttccaccagagattctgccgtggccatttctggagcagattcccgaggaatcctagaagagccgttgccttcaacaagcagtgaagaagaagatccccttgcgggtatcagtctccctgaaggtgtggacccctcttttctggctgccctgcctgatgacatccgtcgggaagttctacagaaccagctaggcattcgtccaccaacccggactgccccctccacaaatagctcagcgcctgcagtggtggggaatcctggtgtgactgaagtgagccctgagtttctggctgccctgcctccagccattcaggaggaagtactggcacagcagagagctgagcagcagcgacgagaactagcacagaatgccagctcagacacccctatggaccctgtgaccttcatccagactctgccctcagacctgcgccgtagtgtcctagaggatatggaggacagtgtgttagctgtgatgccacctgacattgcagctgaggctcaagccctgagacgagagcaagaagcccggcagcgacagctcatgcatgagcgtctgtttgggcacagtagcacctccgcactctctgctattctccgaagcccggctttcaccagtcgcttaagtggcaaccgtggggtccagtatactcgccttgctgtgcagagaggtggcaccttccagatggggggtagcagcagccataacaggccttctggcagtaatgtagatactctcctccgcctccgaggacggctccttctggaccacgaagccctttcttgtctcttggtcctactttttgtggatgagccaaagctcaatactagccgtctacaccgagtactgagaaatctctgctaccatgcccagacccgccactgggtcatccgcagtctgctctccatcttgcagcgcagcagtgagagtgagctatgcattgaaacacccaaactcactacaagtgaggaaaagggcaaaaagtcgagcaagagctgtgggtcaagtagccatgagaaccgtcccctggacctgctacacaagatggagtcaaagagctccaaccagctttcctggctctcagtatccatggatgcagccctaggctgcaggactaatatatttcagatccagcgttcaggggggcgtaaacataccgagaagcatgcaagcggtggctccaccgtccacatccatccccaagctgctcctgttgtctgcagacacgttttggatacactcattcaattggccaaggtatttcccagccacttcacacagcagcggaccaaagaaacaaactgtgagagtgatcgggaaaggggcaataaggcctgtagcccatgctcctcacagtcctccagcagtggcatttgcacagacttctgggacttattggtaaaactggacaacatgaatgtcagccggaaaggcaagaactccgtgaagtcagtgccagtgagcgctggcggtgagggggaaacctctccatacagcctcgaggcctctccactggggcagctcatgaacatgttgtcacacccagtcatccgccggagctctctcttaactgagaaactcctcagactcctttctctcatctcaattgctctcccagaaaacaaggtgtcagaagcacaggctaattctggcagcggtgcttcctccaccaccactgccacctcaaccacatctaccaccaccaccactgccgcctccaccacgcccacaccccctactgcacccacccctgtcacttctgctccagccctggttgctgccacggctatttccaccattgtcgtagctgcttcgaccacagtgactacccccacgactgctaccactactgtttcaatttctcccactactaagggcagcaaatctccagcgaaggtgagtgatgggggcagcagcagtacagactttaagatggtgtcctctggcctcactgaaaaccagctacagctctctgtagaggtgttgacatcccactcttgttctgaggaaggcttagaggatgcagccaacgtactactgcagctctcccggggggactctgggacccgggacactgttctcaagctgctactgaatggagcccgccatctgggttataccctttgtaaacaaataggtaccctgctggccgagctgcgggaatacaacctcgagcagcagcggcgagcccaatgtgaaaccctctctcctgatggcctgcctgaggagcagccacagaccaccaagctgaagggcaaaatgcagagcaggtttgacatggctgagaatgtggtaattgtggcatctcagaagcgacctttgggtggccgggagctccagctgccttctatgtccatgttgacatccaagacatctacccagaagttcttcttgagggtactacaggtcatcatccagctccgggacgacacgcgccgggctaacaagaaagccaagcagacaggcaggctaggttcctccggtttaggctcagctagcagcatccaggcagctgttcggcagctggaggctgaggctgatgccattatacaaatggtacgtgagggtcaaagggcgcggagacagcaacaagcagcaacgtcggagtctagccagtcagaggcgtctgtccggagggaggaatcacccatggatgtggaccagccatctcccagtgctcaagatactcaatccattgcctccgatggaaccccacagggggagaaggaaaaggaagaaagaccacctgagttacccctgctcagcgagcagctgagtttggacgagctgtgggacatgcttggggagtgtctaaaggaactagaggaatcccatgaccagcatgcggtgctagtgctacagcctgctgtcgaggccttctttctggtccatgccacagagcgggagagcaagcctcctgtccgagacacccgtgagagccagctggcacacatcaaggacgagcctcctccactctcccctgcccccttaaccccagccacgccttcctcccttgacccattcttctcccgggagccctcatctatgcacatctcctcaagcctgccccctgacacacagaagttccttcgctttgcagagactcaccgcactgtgttaaaccagatcctacggcagtccacgacccaccttgctgatgggccttttgctgtcctggtagactacattcgtgtcctcgactttgatgtcaagcgcaaatatttccgccaagagctggagcgtttagatgaggggctccggaaagaagacatggctgtgcatgtccgtcgtgaccatgtgtttgaagactcctatcgtgagctgcatcgcaaatcccccgaagaaatgaagaatcgattgtatatagtatttgaaggagaagaagggcaggatgctggcgggctcctgcgggagtggtatatgatcatctctcgagagatgtttaaccctatgtatgccttgttccgtacctcacctggtgatcgagtcacctacaccatcaatccatcttcccactgcaaccccaaccacctcagctacttcaagtttgtcggacgcattgtggccaaagctgtatatgacaaccgtcttctggagtgctactttactcgatccttttacaaacacatcttgggcaagtcagtcagatatacagatatggagagtgaagattaccacttctaccaaggtctggtttatctgctggaaaatgatgtctccacactaggctatgacctcaccttcagcactgaggtccaagagtttggagtttgtgaagttcgtgacctcaaacccaatggggccaacatcttggtaacagaggagaataagaaggagtatgtacacctggtatgccagatgagaatgacaggagccatccgcaagcagttggcggctttcttagaaggcttctatgagatcattccaaagcgcctcatttccatcttcactgagcaggagttagagctgcttatatcaggactgcccaccattgacatcgatgatctgaaatccaacactgaataccacaagtaccagtccaactctattcagatccagtggttctggagagcattgcgttctttcgatcaagctgaccgtgccaagttcctccagtttgtcacgggtacttccaaggtacccctgcaaggctttgctgccctcgaaggcatgaatggcattcagaagtttcagatccatcgagatgacaggtccacagatcgcctgccttcagctcacacatgttttaatcagctggatctgcctgcctatgagagctttgagaagctccgccacatgctactgttggctatccaggagtgctctgaaggctttgggctggcctaataaggccctgcccaactccgtggggttttttttaccattgttggacctggggaggggggagttaaaaaaagaaccagaaagaaattgtcaaaaaccaataaatgaaatccaccaactcaccgtgtgtgtcccagctgccccatcttccccagcgcatacctgttcctcttctcattctctccccgccgcctgtttcctcaccttctctcccctttccatgccgtccatgatccccaccccatgtgttttaaaaaggcagtagcctttgcagggacctgtctgtcccaactgtttgaacagtgtgctcctcagattctgtgttcagaaggatttgctgcattgagacttgaaacctttggataggggaaaaaattatatatatatatatttttttgttctgtttgcatttcttaatttgtgcttggaatgtgttgatgtgcacagctaatgattcaatgcgagacaagattggcgtctgtgttgtggaggtttcaaataaagagcactcttcataactcaaaaaaaaaaaaaaaaaaaaaaaaaaaa

SEQ ID NO: 273 - DNA, 4442 bp, Homo sapiens
gaccactgtgagcccgcggcgtgaggcgtgggaggaagcgcggctgctgtcgcccagcgccgccccgtcgtcgtctgccttcgcttcacggcgccgagccgcggtccgaagtcttgctgtgtcacccaggctgccaggctggagtggagtggcatgatctcggctgactgcaacctctgcctcccagaatatgacagatacctagcatctagcaaaataatggcagctgcttaccttgaccccaacttgaatcacacaccaaattcgagtactaagactcacctgggtactggtatggaacgttctcctggtgcaatggagcgagtattaaaggtctttcattattttgaaagcaatagtgagccaaccacctgggccagtattatcaggcatggagatgctactgatgtcaggggcatcattcagaagatagtggacagtcacaaagtaaagcatgtggcctgctatggattccgcctcagtcacctgcggtcagaggaggttcactggcttcacgtggatatgggcgtctccagtgtgagggagaagtatgagcttgctcacccaccagaggagtggaaatatgaattgagaattcgttatttgccaaaaggatttctaaaccagtttactgaagataagccaactttgaatttcttctatcaacaggtgaagagcgattatatgttagagatagctgatcaagtggaccaggaaattgctttgaagttgggttgtctagaaatacggcgatcatactgggagatgcggggcaatgcactagaaaagaagtctaactatgaagtattagaaaaagatgttggtttaaagcgattttttcctaagagtttactggattctgtcaaggccaaaacactaagaaaactgatccaacaaacatttagacaatttgccaaccttaatagagaagaaagtattctgaaattctttgagatcctgtctccagtctacagatttgataaggaatgcttcaagtgtgctcttggttcaagctggattatttcagtggaactggcaatcggcccagaagaaggaatcagttacctaacggacaagggctgcaatcccacacatcttgctgacttcactcaagtgcaaaccattcagtattcaaacagtgaagacaaggacagaaaaggaatgctacaactaaaaatagcaggtgcacccgagcctctgacagtgacggcaccatccctaaccattgcggagaatatggctgacctaatagatgggtactgccggctggtgaatggaacctcgcagtcatttatcatcagacctcagaaagaaggtgaacgggctttgccatcaataccaaagttggccaacagcgaaaagcaaggcatgcggacacacgccgtctctgtgtcagaaacagatgattatgctgagattatagatgaagaagatacttacaccatgccctcaaccagggattatgagattcaaagagaaagaatagaacttggacgatgtattggagaaggccaatttggagatgtacatcaaggcatttatatgagtccagagaatccagctttggcggttgcaattaaaacatgtaaaaactgtacttcggacagcgtgagagagaaatttcttcaagaagccttaacaatgcgtcagtttgaccatcctcatattgtgaagctgattggagtcatcacagagaatcctgtctggataatcatggagctgtgcacacttggagagctgaggtcatttttgcaagtaaggaaatacagtttggatctagcatctttgatcctgtatgcctatcagcttagtacagctcttgcatatctagagagcaaaagatttgtacacagggacattgctgctcggaatgttctggtgtcctcaaatgattgtgtaaaattaggagactttggattatcccgatatatggaagatagtacttactacaaagcttccaaaggaaaattgcctattaaatggatggctccagagtcaatcaattttcgacgttttacctcagctagtgacgtatggatgtttggtgtgtgtatgtgggagatactgatgcatggtgtgaagccttttcaaggagtgaagaacaatgatgtaatcggtcgaattgaaaatggggaaagattaccaatgcctccaaattgtcctcctaccctctacagccttatgacgaaatgctgggcctatgaccccagcaggcggcccaggtttactgaacttaaagctcagctcagcacaatcctggaggaagagaaggctcagcaagaagagcgcatgaggatggagtccagaagacaggccacagtgtcctgggactccggagggtctgatgaagcaccgcccaagcccagcagaccgggttatcccagtccgaggtccagcgaaggattttatcccagcccacagcacatggtacaaaccaatcattaccaggtttctggctaccctggttcacatggaatcacagccatggctggcagcatctatccaggtcaggcatctcttttggaccaaacagattcatggaatcatagacctcaggagatagcaatgtggcagcccaatgtggaggactctacagtattggacctgcgagggattgggcaagtgttgccaacccatctgatggaagagcgtctaatccgacagcaacaggaaatggaagaagatcagcgctggctggaaaaagaggaaagatttctgaaacctgatgtgagactctctcgaggcagtattgacagggaggatggaagtcttcagggtccgattggaaaccaacatatatatcagcctgtgggtaaaccagatcctgcagctccaccaaagaaaccgcctcgccctggagctcccggtcatctgggaagccttgccagcctcagcagccctgctgacagctacaacgagggtgtcaagcttcagccccaggaaatcagcccccctcctactgccaacctggaccggtcgaatgataaggtgtacgagaatgtgacgggcctggtgaaagctgtcatcgagatgtccagtaaaatccagccagccccaccagaggagtatgtccctatggtgaaggaagtcggcttggccctgaggacattattggccactgtggatgagaccattcccctcctaccagccagcacccaccgagagattgagatggcacagaagctattgaactctgacctgggtgagctcatcaacaagatgaaactggcccagcagtatgtcatgaccagcctccagcaagagtacaaaaagcaaatgctgactgctgctcacgccctggctgtggatgccaaaaacttactcgatgtcattgaccaagcaagactgaaaatgcttgggcagacgagaccacactgagcctcccctaggagcacgtcttgctaccctcttttgaagatgttctctagccttccaccagcagcgaggaattaaccctgtgtcctcagtcgccagcacttacagctccaacttttttgaatgaccatctggttgaaaaatctttctcatataagtttaaccacactttgatttgggttcattttttgttttgtttttttcaatcatgatattcagaaaaatccaggatccaaaatgtggcgtttttctaagaatgaaaattatatgtaagcttttaagcatcatgaagaacaatttatgttcacattaagatacgttctaaagggggatggccaaggggtgacatcttaattcctaaactaccttagctgcatagtggaagaggagagcatgaagcaaagaattccaggaaacccaagaggctgagaattcttttgtctaccatagaattattatccagactggaatttttgtttgttagaacacccttcagttgcaatatgctaatcccactttacaaagaatataaaagctatattttgaagacttgagttatttcagaaaaaactacagccctttttgtcttacctgccttttactttcgtgtggatatgtgaagcattgggtcgggaactagctgtagaacacaactaaaaactcatgtcttttttcacagaataatgtgccagttttttgtagcaatgttatttctcttggaagcagaaatgctttgtaccagagcacctccaaactgcattgaggagaagttccagaaccatcccctttttccatttttatataatttataaagaaagattaaagccatgttgactattttacagccactggagttaactaacccttccttgtatctgtcttcccaggagagaatgaagcaaaacaggaatttggttttcttttgatgtccagttacaccatccattctgttaattttgaaaaaatataccctccctttagtttgttgggggatataaattattctcaggaagaatataatgaactgtacagttactttgacctattaaaaaggtgttaccagtaaa

SEQ ID NO: 274 - DNA, 10383 bp, Homo sapiens
gccgccatcttgcttctttttctcgctcgctcgctccccctcggaaagctgcgaaagtgctttggcggtttgtccatccgcagcttcggcttttccagtctggtggcccttccggccacccctttaaccccagctttccctcccccttctttcgatcagagatcggcggagaccctcgaagtgcgcaaacttgacactcaccctgaccggactggggttttaaggggtgtggcaggaggttttggactcgatgagtttccaccgaaatgtcggagaagtcaggccagagcacaaaagcaaaggatgggaaaaagtatgcaacactcagtttatttaatacttacaaggggaaatcattagaaacacagaaaaccacagctcgacatggattacagagtcttggaaaagtcggtatttcacggcgtatgcctccacctgctaacctcccaagtcttaaagcagaaaacaaaggcaatgatcctaatgtaaacattgtacctaaagatggcacagggtgggcatcaaaacaagagcaacatgaagaagaaaaaacaccagaagtgccaccagcacagccaaaacctggggttgcagctcccccagaagtagcacctgctcccaaatcatgggccagtaacaagcaaggtgggcaaggagatggaatccaagtgaatagtcagtttcagcaagaatttcccagcctgcaggcagctggggatcaggaaaaaaaagaaaaggaaacaaatgatgacaactatggacctggacccagtttacgtccaccaaatgttgcttgttggagagatggtggtaaggctgctggctcaccttcgtcatctgatcaagatgaaaagctccctggccaggatgaaagcacagctggaacatcagagcaaaatgatatcctcaaagtggtggaaaagaggatagcttgtggtcctccacaggctaaactgaatggacagcaggctgctctcgcttcccagtatagagctatgatgcctccttatatgttccaacagtatccgaggatgacatatcctcctctacatggtcccatgagattcccaccttctttatctgaaacaaacaaaggccttcgaggaagaggcccacctccttcatgggcctctgagcctgaacgcccatccattcttagtgcatcagaactgaaggagcttgataaatttgataacctagatgctgaagctgatgaaggttgggcaggtgctcagatggaagtagattatacagagcaactgaatttcagtgatgatgatgaacaaggaagtaacagtcctaaagagaataacagtgaggatcaaggttcaaaagcctctgaaaacaacgaaaacaaaaaagaaacagatgaagtttccaacactaaatcatcttcccaaatacctgcccaaccatcagtagcaaaagttccctatgggaaaggaccttcatttaatcaggaacgtggaacatcttcacatctgccaccacctccaaagttgcttgcacagcagcatccacctccagatcgacaggcagtacctggaagaccaggcccctttccctccaagcagcaagtagctgatgaagatgaaatatggaagcaaagacgaagacaacaatcagaaatttctgcagcagtagaacgtgctcgtaaacggcgtgaagaggaagagcgaagaatggaagaacaaaggaaggcagcttgtgcggagaaactgaaacgattggatgagaagcttggcatcctggaaaaacaaccatctccagaggaaattagggaaagggagcgagaaaaagaacgggagcgtgagaaagaacttgaaaaagaacaagaacaggagcgagagaaggagagggaaaaagacagagagagacagcaggaaaaggagaaagagctggagaaggagcaggaaaaacaaagagaaatggagaaagaaagaaagcaagaaaaagaaaaagaactagaacggcagaaagaaaaggaaaaagaactacaaaagatgaaagaacaagaaaaggaatgtgagctggagaaggaaagggaaaaattagaggagaaaattgaacccagagaacctaatttagagcccatggtagaaaaacaagaaagtgaaaacagctgtaataaagaggaggaacccgttttcactagacaagacagcaatcgcagtgaaaaggaagccacaccagtggtgcatgaaacagaaccagaatcagggtctcaacctcggccggctgtattatctggctatttcaaacagtttcagaagtctttacctccacgattccagcggcagcaggaacagatgaaacagcagcagtggcagcagcagcaacagcaaggtgtacttccacagactgttccttcacaaccgtccagtagtactgtccctcctccaccacacagacctctttatcagcctatgcagcctcatcctcagcatttggcttctatgggttttgatccaaggtggctcatgatgcagtcctacatggatcctcgaatgatgtcaggaagacctgctatggatattccacccattcatcctggaatgattcctcctaaaccattaatgagaagagaccagatggaagggtcaccgaacagttctgagtcatttgagcatatagctcgatctgcaagagatcacgcaatttccctttctgagcctcgtatgctgtgggggtcagatccctatcctcatgctgagcctcaacaagcaactactcccaaagcaacagaagagcctgaggatgtaaggtctgaagctgcgttggaccaggaacagattactgctgcttattctgtagaacataatcaattagaggctcacccaaaggcagactttatcagagaatcaagtgaggcacaagtacaaaagtttttaagcagatctgtggaagatgttagacctcaccatactgatgcaaataatcagtctgcttgttttgaagcacctgatcaaaagaccttatccgctcctcaagaggagcggatttcagctgtagaaagtcagccttcccggaaaagaagtgtttcccatggatctaaccatacgcaaaaaccagacgagcagagaagtgaaccatctgcaggcattcctaaagtaaccagcagatgcattgattcaaaagaaccaatagaaaggccagaggagaaaccaaaaaaggaaggctttatacgatcttctgaaggaccaaaacctgaaaaagtatataaatctaaatcagaaactcgttggggcccacgaccaagctctaacagaagggaagaagttaatgatagacctgtgagaagatcaggtcccattaaaaaacctgtacttagagatatgaaagaggaacgggaacagaggaaggagaaagaaggagaaaaggccgaaaaggtcactgaaaaagtagttgtaaagcctgaaaagacggaaaagaaggatcttcctcctcccccaccaccacctcagccaccagcaccaattcagccacagtcagttccaccaccaattcaaccagaagcagagaaatttccttcaacagaaactgcaactttggctcaaaaaccatctcaggatactgagaagcctctggaacctgtgagtactgttcaggtagagcctgcagttaagactgtaaaccaacagactatggcagcaccagtagtcaaagaagaaaaacaacctgagaaagtcatcagcaaagaccttgttatagagaggcctcgaccagattcaagaccagcagttaaaaaagaatcaactttgcctcccaggacctattggaaagaagctagagagagagattggtttccagatcaaggatacagaggtcgaggccgaggtgaatattactccagaggtcgaagctatagaggttcttatggagggcgtggcaggggtggtaggggacacactcgagattatcctcagtatagagacaataagccaagagcagagcatataccctcagggcctctcagacagcgagaagaaagtgaaacacggagtgagagctctgattttgaagttgtccccaaaagaagacgacagcggggttcagagactgacacagacagtgaaattcatgaaagtgcaagtgacaaggacagtttaagtaaaggcaaacttcccaaaagagaggaacggcctgaaaacaaaaaacctgtaaagcctcattcttctttcaagcctgataatcatgttcgaatagataatagactgctagaaaagccttatgtaagggatgacgataaagctaaaccaggctttcttcctaaaggagagcctacaaggagaggcagagggggaacattcaggcgtggtggaagggatcctggaggccgtccatcacgcccttccactttacgaagaccagcttatcgggacaatcagtggaacccaaggcagtcagaagttcctaaaccagaagatggagagccgccaagaagacatgagcagtttattcctatagcagcagataaacgacctccaaaatttgagcgaaaatttgacccagctagagaaaggcctcgaaggcagcgtcctactcgaccaccaaggcaagacaagccacctcgatttagacggctaagagagagggaggctgcttcaaaatcaaatgaggtggtagcagtgcccacaaatggcacagttaataatgtggctcaagaaccagttaatactcttggggatatttccgggaataagacaccagatttatctaatcagaactcttcagatcaggcaaatgaagaatgggaaacagcttctgaaagcagtgatttcaatgagaggcgagagagggatgaaaaaaaaaatgctgacttgaatgcacaaacagttgtaaaggttggagagaatgttctacctccaaagagggaaattgcaaagagaagtttttctagtcagagaccagtagatcgtcagaatcgacgtggcaacaatggtccacccaaatcaggaaggaatttctcaggtcctagaaatgaaaggagaagtggcccaccatcaaaaagtgggaagagagggccatttgatgaccagcctgcaggcacaactggggttgacctcatcaatggcagctctgcacaccatcaggaaggagtacctaatggtacaggacaaaagaactccaaagattctactgggaaaaaaagagaagaccccaaaccaggccctaaaaaaccaaaagagaaagtggatgctctatcacagtttgatctcaacaattatgcaagtgttgttataattgatgatcatcctgaagtaacagtaattgaagatccccagtcaaatttgaatgatgatggttttactgaagtggtatccaaaaaacaacaaaaacgtttacaggatgaagaacgccgaaagaaggaagaacaagtcatacaggtctggaacaaaaagaatgcaaatgaaaaaggaagaagccagacttctaagcttcctccaagatttgccaaaaaacaggctacagggatccagcaagcacagtcttcagcctcagttccacctctagcttcggctccacttccaccttcaacctcagcttcagttccagcctcaacctcagctccacttccggcaaccttaactccagttccagcctcaacctcagctccggttccagcctcaactttagctccagttctggcctcaacctcagctccagttccagcctcacccttagctccagtttcagcctcagcctcagtctcagcttcagttccagcctctacttcagctgcagctataacctcttcttcagctccagcctcagccccagctccaacccccatccttgcctcagtttcaaccccagcttctgtcaccattcttgcctcagcctcaattcccattcttgcttcagccctagcatcaacttcagctccaacgccagccccagcagcctcttccccagctgccccagtcatcacagcaccaactatcccagcctcagccccaactgcctcagtcccacttgcccctgcctcagcttcagccccagccccagcccctaccccagtctcagccccaaatcctgccccacctgccccagcccagactcaggcacagacccacaaaccagtccagaatccactacagactacatctcagtcttcaaaacaaccaccaccatcaattaggctgccttcagctcaaacacctaatggcacagattatgtagcctcaggaaaatccatccagaccccacagtcacatggcactctgacagctgaattatgggataacaaggtggccccaccagctgtgctgaatgatatctctaagaaattaggtcccattagtccaccacagccaccttcagtcagtgcatggaataagcccttaacatcgtttggatcagctccttcatcagagggagcgaagaatggtcaagaaagtggactcgaaattggaactgacacaattcagtttggtgctccagcctcaaatggaaatgaaaatgaagttgttcctgtgctttcggaaaaatctgctgacaaaatacctgaacctaaagaacagcggcagaagcagccacgagcaggacctatcaaagcccagaagcttccagatttgagtccagtagaaaacaaagaacacaaacctggtcccattggaaaggaacgttcattaaaaaatagaaaagtaaaagatgcccaacaggtggagccagaaggacaagagaaaccaagcccagctacagtcagaagcacagatcctgtcacgacaaaggagactaaagcagtctcagaaatgtctactgaaataggaacaatgatctcggtatcatctgcagaatatggtactaatgcaaaggagtctgtaacagactatactacaccctcttcttctttgcctaacaccgtggctactaataatacaaagatggaggatactttggttaataatgtgcccctgcccaacacccttcccctccctaagagggagactatacaacagagctccagcctaacttcagttcctcccactactttcagcctcaccttcaagatggagtctgcacgcaaagcatgggagaattctccaaatgtaagggaaaaggggtctccagtaacttccacagcacctccaattgcaactggagtcagcagtagtgccagtggaccaagcactgctaattacaattcgttctcaagtgcatccatgccccagattcctgttgcttcagtcactcctacagcatcactatcaggagctggtacatacactacctcttctttgagcacaaaatctacaaccacatcggaccctccaaatatttgtaaagtgaaacctcagcagttacagacaagcagcctgccttctgcaagtcatttttcacagttaagctgtatgccttcccttattgcccagcagcaacagaatccgcaagtttatgtgtctcagtctgcagcagctcaaatcccagccttctatatggacacaagtcatttattcaatacccaacatgcacgattggctccgccatccttggctcaacaacagggtttccaaccaggtctctctcagccaacttcagttcagcagattccaatccctatttatgcaccactgcaagggcagcatcaagcccaactgagtttgggggctggccctgctgtttcccaggctcaggaattgttcagctcctcacttcaaccatatagatctcagccagcttttatgcaaagcagtttatcccagccatctgtggtcctttctggtactgctattcacaactttccaactgtccaacaccaagaacttgccaaggcacaatccggtcttgcctttcagcaaacatcaaatactcagcccattcctatattgtatgaacatcaactggggcaggcatcaggactaggaggttcccagctgattgacacacatcttctccaggccagagcaaatcttacccaggcctcaaatctttattctggacaagtacaacagcctggtcagacaaatttttataacactgcccagtcaccaagtgctctccagcaggttacagtacctttaccagcatcgcagctttccttgcctaattttggatctacagggcaacctctaattgctttgcctcagactcttcagcccccattacagcataccactccccaagcacaggctcagagtctgagtcgtcctgcacaagtaagccagcctttcagaggattaattcctgctggaacacagcatagcatgattgcaaccacaggaaaaatgtctgaaatggaactaaaagcctttggaagtggcattgatataaaaccaggcacacctccaatcgctggtagaagcaccacaccaacatctagtccttccgggctacttctacaagtccgaacagccagtccagcaaaatgaacagcattgtctaccagaagcagttccagtcagcccctgccactgtgagaatgacacaaccatttcctacacagtttgcaccccaggcaaagcagagagcagaggttcttcagtccacgcaacggttcttctctgaacagcaacagagcaaacagataggaggaggcaaagcccagaaagtggacagtgattcaagtaaacctcctgaaacactgaccgaccctcctggggtctgtcaggaaaaagtagaagaaaagccaccccctgcaccctccatagccaccaaacctgttagaactggaccaatcaaacctcaggcgatcaaaaccgaagaaacaaaatcttaaaggctatggtttattgcaggggattgggaggggggcgggaaaacatggagaattaagtcagataatgctggcagccaaaggggcaaaatggcctgtgacattatcctgttcagagcttggagatgtacaagggacataggagcaatttacactgacacacagctgctgtaccagtgaaaacgaggctttgcaagcttgtacctactatataacatgtgcttggttgatggccatgcatcttcagtcagaatttatatataaatgtatgcacccatttttttgagtgcatataatttagacctaaaaatccttatgattagatgaaacaccaaaaatataaggaaaataacacagcagaggaatagctcagcctgaacagtgtgatggtcccagctactacatcagatgcggtttttttgctcccttatgttcttcggatatggttatggcatttgtaggcttggaggtaaagaactgaagataactggtgctggatagaggagccttattttttattatggcagcttgctatttttataacatggtgattgagttgaacacaatcaaagtacagtagtaactgatgtccccttcttcctggatgaatgagcagataaatattgatgtcagcatccttgaaccatatcaaagtgagcagtgtttggctactgcttctatttgaaatggtgctgtgttttggttgtggtctgaagctttgaagcgctacttagcatctcctttcttccatggagctctcacgattcaaacatgacagatttggtaaaatgctggttaggttgagtcttccttgcccccactcagtcatctttgtatgaatcccatgatttgggggtttttttctttttttttttataccagtttttagctggtgtttatgaagaacagtgagtacctagaactgtgccactaattaaaggaaatcctaagaaggtgcatttctttacagagctgtgtcatgccatcctttgggccctctgctggaaaagtagaatcaagtctcaaataatgcctttttaattgtatcctctagtattatagatataggacagtactgtatcatacctctgtgaatgtaaaatatcttgtacctgctttatgatacgtagtagtgaccgtgctttatcagagctgtttttaatgatgttattctagaatgttttctttccagatgatgattcagaagctaattttaaaaaacggtgccaggtaccacaacagtaacagaactttgcaattttctggggttttgttttttacctttttccccccttttttttaaatggagtgtgctggatgtctctataattttattcagatgactgcagaacctggaaaagctgttgctgctattgatgcataacatactgctattggtctttttatataaatatatatatatatatacatatatatatataatttgaatttttggaaactttagctgtgctgtcaactttggaaaaagtatcccggtttactgtgttgagttggcattgtacagaaattaacagccatattggtctagaaacgttaaacttaatttttttccatttgtacaggggtaacgcactgtattaaatatgtaaggtcttatctacatgggtttgattacagaaactaataaagtattctctaaataatga

SEQ ID NO: 275 - DNA, 3678 bp, Homo sapiens
ccccgcgcggcgcgggccagggaagggccacccaggggtcccccacttcccgcttgggcgcccggacggcgaatggagcaggggcgcgcagataattaaagatttacacacagctggaagaaatcatagagaagccgggcgtggtggctcatgcctataatcccagcacttttggaggctgaggcgggcagatcacttgagatcaggagttcgagaccagcctggtgccttggcatctcccaatggggtggctttgctctgggctcctgttccctgtgagctgcctggtcctgctgcaggtggcaagctctgggaacatgaaggtcttgcaggagcccacctgcgtctccgactacatgagcatctctacttgcgagtggaagatgaatggtcccaccaattgcagcaccgagctccgcctgttgtaccagctggtttttctgctctccgaagcccacacgtgtatccctgagaacaacggaggcgcggggtgcgtgtgccacctgctcatggatgacgtggtcagtgcggataactatacactggacctgtgggctgggcagcagctgctgtggaagggctccttcaagcccagcgagcatgtgaaacccagggccccaggaaacctgacagttcacaccaatgtctccgacactctgctgctgacctggagcaacccgtatccccctgacaattacctgtataatcatctcacctatgcagtcaacatttggagtgaaaacgacccggcagatttcagaatctataacgtgacctacctagaaccctccctccgcatcgcagccagcaccctgaagtctgggatttcctacagggcacgggtgagggcctgggctcagtgctataacaccacctggagtgagtggagccccagcaccaagtggcacaactcctacagggagcccttcgagcagcacctcctgctgggcgtcagcgtttcctgcattgtcatcctggccgtctgcctgttgtgctatgtcagcatcaccaagattaagaaagaatggtgggatcagattcccaacccagcccgcagccgcctcgtggctataataatccaggatgctcaggggtcacagtgggagaagcggtcccgaggccaggaaccagccaagtgcccacactggaagaattgtcttaccaagctcttgccctgttttctggagcacaacatgaaaagggatgaagatcctcacaaggctgccaaagagatgcctttccagggctctggaaaatcagcatggtgcccagtggagatcagcaagacagtcctctggccagagagcatcagcgtggtgcgatgtgtggagttgtttgaggccccggtggagtgtgaggaggaggaggaggtagaggaagaaaaagggagcttctgtgcatcgcctgagagcagcagggatgacttccaggagggaagggagggcattgtggcccggctaacagagagcctgttcctggacctgctcggagaggagaatgggggcttttgccagcaggacatgggggagtcatgccttcttccaccttcgggaagtacgagtgctcacatgccctgggatgagttcccaagtgcagggcccaaggaggcacctccctggggcaaggagcagcctctccacctggagccaagtcctcctgccagcccgacccagagtccagacaacctgacttgcacagagacgcccctcgtcatcgcaggcaaccctgcttaccgcagcttcagcaactccctgagccagtcaccgtgtcccagagagctgggtccagacccactgctggccagacacctggaggaagtagaacccgagatgccctgtgtcccccagctctctgagccaaccactgtgccccaacctgagccagaaacctgggagcagatcctccgccgaaatgtcctccagcatggggcagctgcagcccccgtctcggcccccaccagtggctatcaggagtttgtacatgcggtggagcagggtggcacccaggccagtgcggtggtgggcttgggtcccccaggagaggctggttacaaggccttctcaagcctgcttgccagcagtgctgtgtccccagagaaatgtgggtttggggctagcagtggggaagaggggtataagcctttccaagacctcattcctggctgccctggggaccctgccccagtccctgtccccttgttcacctttggactggacagggagccacctcgcagtccgcagagctcacatctcccaagcagctccccagagcacctgggtctggagccgggggaaaaggtagaggacatgccaaagcccccacttccccaggagcaggccacagacccccttgtggacagcctgggcagtggcattgtctactcagcccttacctgccacctgtgcggccacctgaaacagtgtcatggccaggaggatggtggccagacccctgtcatggccagtccttgctgtggctgctgctgtggagacaggtcctcgccccctacaacccccctgagggccccagacccctctccaggtggggttccactggaggccagtctgtgtccggcctccctggcaccctcgggcatctcagagaagagtaaatcctcatcatccttccatcctgcccctggcaatgctcagagctcaagccagacccccaaaatcgtgaactttgtctccgtgggacccacatacatgagggtctcttaggtgcatgtcctcttgttgctgagtctgcagatgaggactagggcttatccatgcctgggaaatgccacctcctggaaggcagccaggctggcagatttccaaaagacttgaagaaccatggtatgaaggtgattggccccactgacgttggcctaacactgggctgcagagactggaccccgcccagcattgggctgggctcgccacatcccatgagagtagagggcactgggtcgccgtgccccacggcaggcccctgcaggaaaactgaggcccttgggcacctcgacttgtgaacgagttgttggctgctccctccacagcttctgcagcagactgtccctgttgtaactgcccaaggcatgttttgcccaccagatcatggcccacgtggaggcccacctgcctctgtctcactgaactagaagccgagcctagaaactaacacagccatcaagggaatgacttgggcggccttgggaaatcgatgagaaattgaacttcagggagggtggtcattgcctagaggtgctcattcatttaacagagcttccttaggttgatgctggaggcagaatcccggctgtcaaggggtgttcagttaaggggagcaacagaggacatgaaaaattgctatgactaaagcagggacaatttgctgccaaacacccatgcccagctgtatggctgggggctcctcgtatgcatggaacccccagaataaatatgctcagccaccctgtgggccgggcaatccagacagcaggcataaggcaccagttaccctgcatgttggcccagacctcaggtgctagggaaggcgggaaccttgggttgagtaatgctcgtctgtgtgttttagtttcatcacctgttatctgtgtttgctgaggagagtggaacagaaggggtggagttttgtataaataaagtttctttgtctctttaaaaaaaaaaa

SEQ ID NO: 276 - DNA, 2516 bp, Homo sapiens
gaggtagaggaaaggtcttgacggggtggctggatccgtggcagaatccagttccagattctagacttgagggttctgggctgttggtctgtagaagcgaaggagagaaggactcaaatccaggccaagtgtatggctgtctgaggtattggaacagaaggaggtccattcctgttggtgacaacaccgtggccctgttctgggatgagcaaggtgtaaaggtttcccccaagaaagagcagctgagtccttgcatcttgtggcagctggtgtgcccagcactgagtctgtaggagctgaagccagcccggacccttctcatgggcagtgcccacctgtgctgaagtcctgcagcggtggcggtgtgaggagctgtgaaattagttgtaactgaaaatgtctgacggtctggataatgaagagaaacccccggctcctccactgaggatgaatagtaacaaccgggattcttcagcactcaaccacagctccaaaccacttcccatggcccctgaagagaagaataagaaagccaggcttcgctctatcttcccaggaggaggggataaaaccaataagaagaaggagaaagagcgcccagagatctctcttccttcagactttgagcatacgattcatgtggggtttgatgcagtcaccggggaattcactggaattccagagcaatgggcacgattactccaaacttccaacataacaaaattggaacagaagaagaacccacaagctgttctagatgttctcaaattctatgattccaaagaaacagtcaacaaccagaaatacatgagctttacatcaggagataaaagtgcacatggatacatagcagcccatccttcgagtacaaaaacagcatctgagcctccattggcccctcctgtgtctgaagaagaagatgaagaggaagaagaagaagaagatgaaaatgagccaccaccagttatcgcaccaagaccagagcatacaaaatcaatctatactcgttctgtggttgaatccattgcttcaccagcagtaccaaataaagaggtcacaccaccctctgctgaaaatgccaattccagtactttgtacaggaacacagatcggcaaagaaaaaaatccaagatgacagatgaggagatcttagagaagctaagaagcattgtgagtgttggggacccaaagaaaaaatacacaagatttgaaaaaattggtcaaggggcatcaggtactgtttatacagcactagacattgcaacaggacaagaggtggccataaagcagatgaaccttcaacagcaacccaagaaggaattaattattaatgaaattctggtcatgagggaaaataagaaccctaatattgttaattatttagatagctacttggtgggtgatgaactatgggtagtcatggaatacttggctggtggctctctgactgatgtggtcacagagacctgtatggatgaaggacagatagcagctgtctgcagagagtgcctgcaagctttggatttcctgcactcaaaccaggtgatccatagagatataaagagtgacaatattcttctcgggatggatggctctgttaaattgactgactttgggttctgtgcccagatcactcctgagcaaagtaaacgaagcactatggtgggaaccccatattggatggcacctgaggtggtgactcgaaaagcttatggtccgaaagttgatatctggtctcttggaattatggcaattgaaatggtggaaggtgaacccccttaccttaatgaaaatccactcagggcattgtatctgatagccactaatggaactccagagctccagaatcctgagagactgtcagctgtattccgtgactttttaaatcgctgtcttgagatggatgtggataggcgaggatctgccaaggagcttttgcagcatccatttttaaaattagccaagcctctctccagcctgactcctctgattatcgctgcaaaggaagcaattaagaacagcagccgctaagactgcaagccttacacctcaccatctccctcatgagtaagactgaaataaaactctgctgcaggaaagatggaagaaaagacagtcaaatggggtgggggttctttacctttcaaatgaatagaaacttcttataagcctttttcctactccctcagattatgtaatttatttgtaagcctgaatcgcagcccaaacagggcagcaatgttgaagtgaccataaagtggtcacttccaccgtgaagcgaaagagccagtagtgaatcccctcattttgtgcattcactttgaagaaaaaggtttctcaaagatgcacactccctcttcatagtgttgtgtttgtttttaagttagagagtagtccctcttgcattcaaacctccttcaaaactccttacccaatgtgatgtttttcacttgcattgtcattagatgtccagaaaaaaaaaagatgtcaaaatgtttttctaaaaaaagaaagca

SEQ ID NO: 277 - DNA, 2277 bp, Homo sapiens
gggaaatggcggccgcgggcttggtcgctgtggcagcggctgccgagtactctggcacggtagcgtcgggaggtaacctccctggtgttcactgcggcccaagctccggggcaggccctggttttggcccgggctcgtggagccgctctctcgatcgagccctggaggaggcggcggtcactggggtgctgagcctgagcggccggaaactgagggagtttccccggggagcggccaaccacgacctgacggacaccacccgggcggacctgtcgcgaaatcgcctttcagaaattcctatagaagcatgtcactttgtttctctggaaaatctcaacttgtaccaaaattgtattcgttatattccagaggcaattttaaacctacaagctctaacattcttaaatattagtcggaaccaactgtcaacattgccggtacacttgtgtaatttgccattgaaagtcttaattgctagtaataacaaattggtgtcacttccagaagaaattggacaccttagacatttgatggaacttgatgtgagctgcaatgaaattcaaactataccttcccaaattggtaacctggaggccttgagagaccttaatgtaagaagaaatcacctagtacatttgcctgaagagctggcggagttgcctttgatacggttagacttctcatgcaataaaattaccacaatccctgtttgttatcggaacctcaggcacctacagacgatcaccctagataacaatccactacaatcacctcctgcacagatatgtataaaaggcaaagtccacatatttaaatacctgaacatacaagcttgtaagattgctccagatctgccggattatgataggagaccgttgggttttggctcctgccatgaagaactgtactcaagtcgcccttatggagcccttgattcaggcttcaatagtgtggacagtggtgataagagatggtcagggaatgaacctacagatgaattttcagatctgcctcttcgagtagcagagattactaaagaacaaagactacgaagagaaagccagtaccaagagaaccgcggcagtttggtagtaacaaacggcggagtggaacatgatctggatcagattgactacatagacagctgcaccgcagaggaagaggaggccgaggtgagacagcccaagggaccagacccagacagccttagttcacagtttatggcgtatattgaacagcggcgaatctctcatgagggttcaccagtaaagccagtagccattagggagtttcaaaaaacagaagatatgagaagatacttacatcaaaacagggttccagctgagccatcttccctcctgtcactatcagcaagtcacaatcagctgtcacacacagacctggaacttcatcagagaagggagcagttagtagagcgcactcggagagaggctcagcttgctgccctgcagtatgaggaggagaaaataaggaccaagcagatccagagagatgctgtcctggactttgtcaaacaaaaagcatcacaaagtccacaaaaacagcacccgctcctagatggcgtagatggtgagtgccccttcccatccagaaggtctcagcacactgatgatagtgccttgtgcatgtcgctgtcagggttgaatcaagtgggctgtgctgctaccctgcctcattcttctgccttcacgcctcttaagagtgatgacagacctaatgctctattaagttcacctgcaacagaaacagttcatcattcccctgcatattcttttcctgctgctatccagagaaatcagcctcagcgccctgaaagcttccttttccgagcaggtgtcagggcagaaaccaacaaaggtcatgcttcaccccttcctccatctgctgcacctaccactgattctacagattccataacaggacagaattcaagacagagagaagaagagctggaattaatagaccaactgcgtaaacatattgagtaccggttgaaagtgtctctaccttgtgatctcggagcagctctaactgacggtgttgttctttgccatttggccaatcatgtgcgacctcgatctgtcccaagcattcatgttccctcaccagctgtagtaagttgataatcctaaaaagccttggctattcatcagacatttgttaagcacagtggacagacatttcttaagcattgtgctagatattaaggatacagatataaagagtccagtctctacaaaaaaaaaaaaaaaaaaa

SEQ ID NO: 278 - DNA, 2631 bp, Homo sapiens
cgtccctctttctccaccccgccgagcctaaactagtgacggggagggagacgggatagtgtttctgtttcgtggtctttgaatccacaacctctagtctgaacacagagaacacaaatttgtctattacttcaggaagcccagggggaaccgcgccccgctgaagggctcggggaaggcgcgctcccgcgtcccgccccctcctcccccagcactcacactgtggtagcggcggagggcggagggatccggaggcggcggagggagacgtcattgcagggttgtttgtcagtctcggcggcggcggcggcggcggcggcggcggcgatccacagtgattcggccgccgcgccggggggtgggggggctgcgcgggactttttttttttcagactgaccgcggggcagctgcggagcatgtcgaccccggcccggaggaggctcatgcgggatttcaagcggttacaagaggacccacctgtgggtgtcagtggcgcaccatctgaaaacaacatcatgcagtggaatgcagttatatttggaccagaagggacaccttttgaagatggtacttttaaactagtaatagaattttctgaagaatatccaaataaaccaccaactgttaggtttttatccaaaatgtttcatccaaatgtgtatgctgatggtagcatatgtttagatatccttcagaatcgatggagtccaacatatgatgtatcttctatcttaacatcaattcagtctctgctggatgaaccgaatcctaacagtccagccaatagccaggcagcacagctttatcaggaaaacaaacgagaatatgagaaaagagtttcggccattgttgaacaaagctggaatgattcataatagacaactggtctgttaatctttttcatcattgttgtgtataatttacctctcattagaaaggctaacaaattttaagtgccacaggttttaaggattctgcagaaaaaaaagaaaaaagtccttcagtttagaacctacaaaagcttgtgtatcttgattaatgtactttttattgcatggtgtgaactaagttattgctgcataaatttgtaatatatcctgtttgtatttttttccaagtgtataatgttggtgtggagttttcatgacagaatatacacattttgtaaatctgtacttttttcaaatattgaatgccttatttttgaattctttagatttttaaattggagaaaagcacttaaagttttttatatatgaatattacatgtaaagctgttaaaatacataacttcagtgcaagagactttgtcacttatttccttatgtgtgtaggaggggttaataagtctctagctctccatctattgatagtttcatttacaatttcaaaagaacattcttatattttatcaaggaagtcttcaaatttgattctaaatagcgattataatctccaactttattttgaatgtacctctattagtttcaattgagtaattctagacataactggtttgactctgtccaactctgtatttaggccatttgttacagtttcttcatgcattacttactgttaaaactgtaccttttgcgatttcacagttggcacttctgccatgagcagagaactgatgcgacttgttttgctgcttggtagcactttaaaaaattttttgattaatgaagaaagtaaaaccataaacatttgccaaaaattcatgccccagtattagcaatgaattagttgcattggtttgagaaaggcacatattggagggaaatcttggtgtaacttaaatatttgaaaattacctttaatgcaatgcatatctgtttattctgggaaatgttttaatgccagggcctgctgagttgcttcttcttgtggagattttttttttaatctcctgagttgtataaaagttgtactgcatcttagtttactggataaatttaaaacacagtattgtagaaagctaatacaaaactatcctatgccttcaaatagtatagaaaatggaaaatatacaagtaaattctgttgaaccacctgtgtagtctctctagtagttaaaacagctattttagtaaccccaagagtttcttctcatatccataaaattggattacagtatggcaatatctacagcttctattcattatgcaacgtttaacattgattggataaatgcttataggctgggccaggtggctcccacctgtagtcccagcactttgggaggcaaaggcgggaggatcacttgaggccaggactttgagaccagccagggcaacataataagacttttctctactttaaattttttaaaaaattagttgggcatagtggcacttgcctgtagtctcagctacttaggaggctgaggtggcagaatagcttatgcctaggaggttgaggctgcagtgagctgtgattatgccattgcactccagcctgggtgacagagcaataccctgtctttaaaaataaaagctattacttggcaaattctgaggtaagtgtatgatcttagggaactttgatacaaatgggaattcactcactggaatcgtggctcccaaaaagatgctttaattgtgtggtgcttttatagtttagctcca

SEQ ID NO: 279 - DNA, 4877 bp, Homo sapiens
atggatggaggtgctttaactgatacaagtctcacagattcctattttagcaccagctttattggagtcaatggatttggaagccctgtagaaacaaaatatcccctgatgcagagaatgactaatagtagcagctccccaagccttctaaatgacagtgccaagccatattcagcccatgatcctctaacatcacctgcttcatccttgtttaatgactttggtgccctcaacatctctcagagacgaaagacaccaaatcctactgcaagcgagtttattcctaaaggaggatcaacctccaggctgagtaacgtgtcccagtcaaatatgtctgccttctctcaagttttctctcacccatccatgggaagccctgctactgctggattagcgccaggaatgtcgttgtctgctgggtcttcccctcttcattcccccaagattactccacatacttctcctgctcccagaagaagaagtcacactccaaatccagcaagttacatggtgccttctagtgcctctacatctgttaataatcctgtttctcagactccgtcttctggtcaggtgatccaaaaggaaactgttggtgggacgacttacttctatacagacacaactccagcacctttgactggaatggtgtttccaaactatcatatttatcctccaactgcacctcacgttgcttatatgcaaccgaaagcaaacgcaccttccttcttcatggctgatgaactccgacaggagctgatcaacagacatttaataacaatggctcaaattgatcaagcagatatgccagcagttcctacagaggttgacagctaccatagcctattccctctagaaccactgccacctcccaaccggatacagaaatcaagtaattttggatatattacatcttgctacaaagctgtaaacagcaaagatgatctgccatattgccttcggaggatacatggttttcgtcttgttaacacaaagtgcatggtgttggtcgacatgtggaagaaaattcaacactcaaatatcgtaactttgcgtgaagtatttaccactaaagcatttgctgagccctctcttgtgtttgcatatgatttccatgctggaggagaaactatgatgagcagacactttaatgaccctaatgctgatgcctacttcaccaagagaaagtggggtcagcacgagggaccattgcccaggcagcatgctggattattgccagaatctcttatttgggcatatattgtccaactaagttctgcattgcgtaccattcatacagcaggtttggcatgtcgagttatggatccaacaaagattctgataactggcaaaacaaggttgcgagtaaattgtgttggagtttttgatgttttaacatttgataacagtcaaaataataatccattggcattaatggcccagtaccagcaagcagatctgatatcattaggaaaagttgtgttggctttggcttgcaactctttggcaggaattcagcgagagaatttacagaaagccatggaactggtgacaatcaactattcctctgacctgaagaatctgattttgtatttgttgactgaccaaaacaggatgcgaagtgtaaatgacatcatgcccatgattggtgctcgattttatactcaattggatgctgctcaaatgagaaatgatgtcatagaggaagaccttgcaaaggaggttcaaaatggaagactgtttaggctcctagcaaaattgggaacaatcaatgagaggccggagtttcagaaggatcccacttggtcagagactggagaccgttatctgttgaaactctttagggatcatctttttcatcaggtgacagaagcaggtgctccctggattgacctcagtcatataatttcttgtcttaacaagctagatgctggtgtgccagaaaaaataagcctgatttccagagatgagaagagtgtacttgtggtgacctacagtgacttaaagcgctgctttgaaaatacttttcaagaactgattgcagctgcaaatggtcagttgtagtatttgctaaaaaagcacgcaggacatggctaaagaccttaaccaatagcaaattgcactacagctgaacttttcatcatctcattcacatttgggaaacgaacaggagatgagcaaagctgcttgcacttcagtcaggtacactgttacttgaaaggaagaatgtttcacttacccaagagctatggctgccattggaggctgttatctgtgaagaatttattttagatttaggagcaccatcaggtgaatgatgttcctgcttttgttttttccacttgtatatgcactaattttaattttttaaagactttttctgatctttgaacttttgccacattgtatacttataatgggaaactttgcaaggacatttttgggaagcaatgctgggcagcgtttttgccattgagggttgcagaatttgctctttttgggatgggttgccctgaataacattacggaccaggtaaataatttcatagaagttcagtatagtacgtaattcttgtaagagtatcgtatgcaagctctctgtatgccacccactgttagttcaaattgagatttttgttttgttttgttcttaagaacataccaagaaaataccagtgaattgttggatatgaattccctgttagttgatttaaatcctttctgaataaagatcagataaacagtaactgaaggagcatgtatagctctttccttcaaattcaactagagcctttttaaaaagacatttgcctgctagtcagatacatttacatttatgcaaattttttaaataggagaaaattaagaaattgtgttaaaggcctaaagttcaggagtgtattactttaggttctttccagtttgctggtttttttttttttttttttttttttttttgggcgggggggaggtttatgaagttttgctctttgaaccacagctttattatggtcctttacactggagacagacacagagacactgttcagaagatgaactaaactcagcagtggtctggtatcaagagctttctgatgttttacagcctgaatttggagggataacgatctgctgtgcctttgcagtcactgcttagcccaaagtaatagtacttttgataataactcactctgtgcgatattcctgaataagtccatctcaaaagtttgggattttcctcctcttaactttcttaatatttggacatgcagttgtcgccaaacttgggtattcatggaatttctagtaaatgaaatacctatactttgatactgaagactgccaaatacataggaattttctttcttaaaaaacagtaatgaagactatatctcctttcccagcactgaatgttttactagcactgggtgctcaccatgcaactgaagaaaatgtggaaactcaaaaggtcaggacagacttccaagcacttgcaactgatgttactgtcttcaattttaataattacacatatttgtatatttcagagaagtttttaatatttctctgtccactttttataagctttaaaatgattttctctgccttgagatttgcatcaagaaaaagcacctctcttcacctgaaagctttgaagactagagacacgctttacacgttttaacaagtatattgagtccacgtttggtagcatcagttgttgagttaaaaagaaaattattgcatttgatctggatggattttaaaagaatataatgttcaatattaaaaggataattcacatttgccaccataatgttcttttttatgtaaaaagaagaacttggagacattaacatgaaaaagtcttttatcattagctcatgtatttgaggaagagcagctgtctttttatatgttttttgacaaatcatattgtattcttttgtacaaaaaagaactacttgtattctagaagaaatatgaaatgcttaatttataagcgggctggagattttttccaatattgttttctttgaaaatgaaaggggatcatctattttagttttggggtctgggaactttttgaaaatttaatttgtggaccaatgttttgtgaaagctaaagagggcaggggttaaaatagggcttgaatttctcattctgtatagaccagcaaacttccctgtgcaaggcaagtttacatcacaaatccaagaatgtttgcatcctaaatgctagtttgcttcagcccctagttaacctcaggacttggtttgcatataaaaggtagacagctgatatgttttcatgaataaatattgtcagccagaaaaggttggtgtcaggtaatgcatatttttttaagctttgttttatatttatttttcatttagtttttattgggaatggttttcaaagaactctcagttctgcctaggtgtttttgggggagccctgttttccatagtgtaattccatttaagaggttgtctaaaagtctttttaattaatagaaagattttaatatccaagagtagtcaaattaaggatataaactttccacaccttcctgtcgtgacagataaaagcacagaaaggacaacccttgaaatcatgtaacgttggtcatttcaatattttgtacctgttttaaattctgttagtgtatttacttcattgtaaatatttttgagggtacctttgtattttgcttttgaccttggttctgtgatttggatgtcaacaacttccctaaaaagcaccagtgtgttaggttctaatgtcatgacccaatttgtgttattcatctttaatcctgttttcagtctctatgtgtacagcagtatttttaataaagaattacagagataaa

SEQ ID NO: 280 - DNA, 7289 bp, Homo sapiens
gctgcaattcaagttggctgggggccggtagtgagatctagggctacttcaacaaaactttgctgcccttcctgctcctcttgtcttcttttctcctgataccttttgatgctctgcacatgttatttgcatagcaaaggcactaagctttccaggaagagagggcaccacttccacccccaataagtcttttttcccgtcttttctttcttttcctttccttttttggggggtggggagggagagaaagggggtttgcaaaggcagcatctcagagtgatagcctagatgtattgaaggcatctcttattctgccaaatcggaaagtcagttctctaaagcccgggttagccagaccatagggttttattctggctgcagaataactggctggtgtggctttgcaaaggggggcaaaaaataaaaaaataaaaaaaattaaaaaaagttagagaggagagggagtacgtgagtcgtccagtgcaatctctattgtctgaaacttactttttatcagaatttgaagatgaaaacggttaaaaaatggccatactttagtaactaatcagcctaatgctttgcttatgaaaacttttaccatcattatttttttcattttggattgagaaaatgaatccagatatagaagaaagtgcaggatgttggataaaagtggctcttaaacagtggaacatccaataactaatttgcaagaagttttaaagaaataaaattgttatgcttcgattttggtatggtattgactctttagcacataggtagccctcaaaaaaatcatccagttttctaaattatggaaattttgtggaagacgttgacctggattttgagcctcatcatggcttcatcggaatttcatagtgaccacaggctttcatacagttctcaagaggaattcctgacttatcttgaacactaccagctaactattccaataagggttgatcaaaatggagcatttctcagctttactgtgaaaaatgataaacactcaaggagaagacggagtatggaccctattgatccacagcaggcagtatctaagttattttttaaactttcagcctatggcaagcactttcatctaaacttgactctcaacacagattttgtgtccaaacattttacagtagaatattgggggaaagatggaccccagtggaaacatgattttttagacaactgtcattacacaggatatttgcaagatcaacgtagtacaactaaagtggctttaagcaactgtgttgggttgcatggtgttattgctacagaagatgaagagtattttatcgaacctttaaagaataccacagaggattccaagcattttagttatgaaaatggccaccctcatgttatttacaaaaagtctgcccttcaacaacgacatctgtatgatcactctcattgtggggtttcggatttcacaagaagtggcaaaccttggtggctgaatgacacatccactgtttcttattcactaccaattaacaacacacatatccaccacagacagaagagatcagtgagcattgaacggtttgtggagacattggtagtggcagacaaaatgatggtgggctaccatggccgcaaagacattgaacattacattttgagtgtgatgaatattgttgccaaactttaccgtgattccagcctaggaaacgttgtgaatattatagtggcccgcttaattgttctcacagaagatcagccaaacttggagataaaccaccatgcagacaagtccctcgatagcttctgtaaatggcagaaatccattctctcccaccaaagtgatggaaacaccattccagaaaatgggattgcccaccacgataatgcagttcttattactagatatgatatctgcacttataaaaataagccctgtggaacactgggcttggcctctgtggctggaatgtgtgagcctgaaaggagctgcagcattaatgaagacattggcctgggttcagcttttaccattgcacatgagattggtcacaattttggtatgaaccatgatggaattggaaattcttgtgggacgaaaggtcatgaagcagcaaaacttatggcagctcacattactgcgaataccaatcctttttcctggtctgcttgcagtcgagactacatcaccagctttctagattcaggccgtggtacttgccttgataatgagcctcccaagcgtgactttctttatccagctgtggccccaggtcaggtgtatgatgctgatgagcaatgtcgtttccagtatggagcaacctcccgccaatgtaaatatggggaagtgtgtagagagctctggtgtctcagcaaaagcaaccgctgtgtcaccaacagtattccagcagctgaggggacactgtgtcaaactgggaatattgaaaaagggtggtgttatcagggagattgtgttccttttggcacttggccccagagcatagatgggggctggggtccctggtcactatggggagagtgcagcaggacctgcgggggaggcgtctcctcatccctaagacactgtgacagtccagcaccttcaggaggtggaaaatattgccttggggaaaggaaacggtatcgctcctgtaacacagatccatgccctttgggttcccgagattttcgagagaaacagtgtgcagactttgacaatatgcctttccgaggaaagtattataactggaaaccctatactggaggtggggtaaaaccttgtgcattaaactgcttggctgaaggttataatttctacactgaacgtgctcctgcggtgatcgatgggacccagtgcaatgcggattcactggatatctgcatcaatggagaatgcaagcacgtaggctgtgataatattttgggatctgatgctagggaagatagatgtcgagtctgtggaggggacggaagcacatgtgatgccattgaagggttcttcaatgattcactgcccaggggaggctacatggaagtggtgcagataccaagaggctctgttcacattgaagttagagaagttgccatgtcaaagaactatattgctttaaaatctgaaggagatgattactatattaatggtgcctggactattgactggcctaggaaatttgatgttgctgggacagcttttcattacaagagaccaactgatgaaccagaatccttggaagctctaggtcctacctcagaaaatctcatcgtcatggttctgcttcaagaacagaatttgggaattaggtataagttcaatgttcccatcactcgaactggcagtggagataatgaagttggctttacatggaatcatcagccttggtcagaatgctcagctacttgtgctggaggtgtccaaagacaggaggtggtctgtaaaaggttggatgacaactccattgtccagaacaattactgtgatcctgacagtaagccacctgaaaatcaaagagcctgcaacactgagccctgcccacctgagtggttcattggggattggttggaatgcagcaagacttgtgatggtgggatgcgcacaagggcagtgctctgcatcaggaagatcggaccttctgaggaggagacgctggactacagtggttgtttaacacaccggcctgtcgaaaaagagccctgcaacaaccagtcatgtccaccacagtgggtggctttggactggtctgagtgtactccaaaatgtggtccaggattcaagcatcggattgttctgtgcaagagcagtgacctttctaagacattcccagctgcacaatgtccagaggaaagcaaacctcctgtccgcatccgctgcagtttgggccgctgccctcctcctcgctgggtcacaggagactggggccagtgttctgctcagtgtggccttggacagcagatgagaactgtgcagtgtctctcctacaccggacaggcatctagtgactgtctagaaactgttcggcctccatcaatgcagcagtgtgaaagcaaatgtgacagtacccccatttctaatactgaagagtgcaaagatgtgaataaagtggcttattgcccactggtgctgaagttcaagttctgcagtcgagcatacttcagacagatgtgttgtaagacctgccaaggacactgacccacagaaagccagagagagtgccttgtcatttcatcatggaaatgcatccatcaaagagagccacccagaggaagaggattgatgtccttgcaaatgcattaccctgtggaaaacgtaaccactggtcagccctagctgacaaaatttcaatattattttagcttctgtgaagtgggatttattgatccaaagtgctggacacggtattaggagggaatgccagattggagagatccaaacaacacagggagacttgcttactgtggagcgtttgtgttctttcgagtaaatccaatagcctgtttacctccttggaccattaagataatttttattatggacttagcaatgacactgaatccatttgtatttaaaactgtttaaaatgtagctgttatgacttggtcaactatggaagtgaagaaggttcagaattcttaagtcatagcttaaaaatatttactgtactttatctcactacaacagcaccacaatttaaattataaaacgggctttgaactataatttaaggagcaattataaatcaaaagtaatgaaagtttgtattatttttcttcattccacttaatttccttaggaataatcccctggttctgaacactgctgtgagccatatataaaactatattaaactgaacaataatgaggggcatagtttaaagcagtgcatcagttactgcagctgtgcaagtctataaactcagtgctgaaagactgtggccaacttgccattgtgcaagtaaagctgagatttccattaaaactttaagagaaaaacatttcaatttcatgcagaaaccagacctggggtatggtacagaccaaaggaccaggccctttgctgccaccacacaggatgccttagttcttatttgagtccctccaactcacttgtgtttacatcctccccagccacagcacggcttctgccctttggattgctgcacgtgtgttgagcttactgagatgataccatgcaaaagatagactggctcggtaaccaggcagacccttttgcagtttgttgacaattacgatgagttccagatgtcccttctttgatatggtagaagggcatttatttatatgagagcaaatgtgtgtgtgtgtttgcgggcgcttttaagtgtgtggatagatgagtgtgcttgcacataatgtgctatttctgtgagttttaaagtaggcaagggataataaccaaagaagaaaatttcatgaagactagacatcataaagcataattttaatagtcactcaaccaagtattttttattttttatggatactctgaatggcaattaaatgtgaaacccagtttcttgggcaagtcaaattctggaatcacatccacctaaattaaaatgactagctcgtattttccccatcttcaagtttcacatcctggtcatcaaaagactcgacagcaagacttagaatgaaaaagggtacttgtttatattaatattttttacttgaacacgtgtagcttgcagcaggttcttgatgaatgtgctttgtgtccaaaatgcctccccattgtacacaggtgtacaccatgcatgcaccaacacctaaaactcaaaactaaatggctattttgtaaggttaatactttcagttaaacagcatgtttgacttgattccatcatggtgctcttaaattacatgtcagtgcatcacatatatcatgatctaatgcagatgactaggctttttccaaaaggaagacagaccctcagacaccaaaagccaatctaaacaactcccaggtttgctgtggacaatcagcatggaatgttttctgcactctcagtcatgaccatctgtatcttgttacctgctttctctctcaacaccacagttctcaaccctgagccttccagagagagctattgatgatacaagaggaatcaccagggcccggatctaagatgcccttagaagaccagcccaagtgccgtcttagccattcagtgaagggcaaacagcccatgggtagtatggcccgagcactgaattcccttgcgccttttcaaagaacagttaacttggtgctaatgtgccctggtgaaataaataaaagatgggcagtttctgtggcattttaggcataggtttgcaatccagatctgattttctccaacataaatatcagctcatgttcttatttcaaaaagatttcttattaccgactaaaagctattttttacctcacctggaaactaccattgtgagggccatcccccaggcactgcacagcaccttggctgatgctggaagaggagggcagtcagtgtcacttctgggatgtgccccagcactgagaacaaaatgcaggcatcccccggggcagcatcagagtgcctttctagagggagccacgcacagaatgtaacaggatgaaacagtttcaagtaagccttgaattgaaacctgagtaggttaaaacaattctatttcatagcacatcacaatactgctgctactctgtagccacccccatggctacatgatgccctattcctaaataataacaatagcattgtcagtggaggctgggccaccatggcagaccttccaaaagtagtgagctacatagactacttagggaaccccagggaaactggtaccctacacctgggagcagtatctgccactgggataaagtcctactaaaaaaggaacggtaaatgtaccctaatgattaaaccccgtgagatacatatgatttccaaatagtccatttcattaggaacttttttgtttgaatgaatgtcacataggtatcctcagtaacacagaacgaaattacctttgtattattgtgattagttgttgcttattattttatactcagtaataatgtggtacactgttaatttttttgcttttgtaaattatattctaatttattgccatgtttcctaacacttgtcctacattcattctcctgcttgtaatgaaaatgaaaaaatcattgtaacacttgatggagtgaaattccacgccaggcacagaatttttttgacatagataatttagtaaaataaaaattcagcttataataatgataaaaaaaaaaaaaaaaaaaaaa

SEQ ID NO: 281 - DNA, 5748 bp, Homo sapiens; identical to SEQ ID NO: 161

SEQ ID NO: 282 - DNA, 628 bp, Homo sapiens
cctgcgtggctgggctgctcgggttagatcgtcaggaaaagcctaaagattagactgtaagaaaagaaaatagaagccatgtttcgaagacctgtattacaggtacttcgtcagtttgtaagacatgagtccgaaacaactaccagtttggttcttgaaagatccctgaatcgtgtgcacttacttgggcgagtgggtcaggaccctgtcttgagacaggtggaaggaaaaaatccagtcacaatattttctctagcaactaatgagatgtggcgatcaggggatagtgaagtttaccaactgggtgatgtcagtcaaaagacaacatggcacagaatatcagtattccggccaggcctcagagacgtggcatatcaatatgtgaaaaaggggtctcgaatttatttggaagggaaaatagactatggtgaatacatggataaaaataatgtgaggcgacaagcaacaacaatcatagctgataatattatatttctgagtgaccagacgaaagagaaggagtagaaaggatgattcttctttggccatcatttggtacagtctcatttccaagtcatgtataatctttatggcttccaaggacaagaattaaaatactcttttacgt

SEQ ID NO: 283 - DNA, 1068 bp, Homo sapiens
gcgcggggcacgctgggacgtctcgctggcgggaggccacgggctttccacagcgcgggggaacgggaggctgcaggatggtcaagctgacggcggagctgatcgagcaggcggcgcagtacaccaacgcggtgcgcgaccgggagctggacctccgggggtataaaattcccgtcattgaaaatctaggtgctacgttagaccagtttgatgctattgatttttctgacaatgagatcaggaaactggatggttttcctttgttgagaagactgaaaacattgttagtgaacaacaacagaatatgccgtataggtgagggacttgatcaggctctgccctgtctgacagaactcattctcaccaataatagtctcgtggaactgggtgatctggaccctctggcatctctcaaatcgctgacttacctaagtatcctaagaaatccggtaaccaataagaagcattacagattgtatgtgatttataaagttccgcaagtcagagtactggatttccagaaagtgaaactaaaagagcgtcaggaagcagagaaaatgttcaagggcaaacggggtgcacagcttgcaaaggatattgccaggagaagcaaaacttttaatccaggtgctggtttgccaactgacaaaaagaaaggtgggccatctccaggggatgtagaagcaatcaagaatgccatagcaaatgcttcaactctggctgaagtggagaggctgaaggggttgctgcagtctggtcagatccctggcagagaacgcagatcagggcccactgatgatggtgaagaagagatggaagaagacacagtcacaaacgggtcctgagcagtgaggcagatgtataataataggccctcttggaacaagtcttgcttttcgaacatggtataatagccttgtttgtgttagcaaagtggaatctatcagcattgttgaaatgcttaagactgctgctgataattttgtaatataagttttgaaatctaaatgtcaattttctacaaattataaaaataaactccactcactatgctaccaaaaaaaaaaa

SEQ ID NO: 284 - DNA, 7136 bp, Homo sapiens
gcttatattttttccagctcccaaattccctttattccactttagtcccttcattttcagagatgaggaaacagattgctttgttcaaagacagctagaactagaacacaggctaatacttgctagccatgtgatatactaatgtcagccaaatacgggcatttacactttcagatgtttgccatatctgtgcacttactaattctgtttaatacaatttaaattgactcctttaaataagcttattttaaaggaaattttttgctactataaatagaaaaccattatatcctttaaatagtaactctaaataggaattcaaaacaaagcaacgttattaaaatttaatttaaaattaatttaaatttaattgttattaaatttttaattattgctgttcttcgtcagaaatgtgtcaaagcattgttttcatgtttgatgtcagttccttaattgtctaaacagaaaaagcacagctaatgcctctagttaagcttctgtataacttttttaaatgaaatgcttcttagaggggaaatgagagggcatgaatacatgtttatatactaaagtatgatttcatgtatatcagaagatcttattatatggaaccaaaattattctttggttgatttaattgttcttgaaacttcagtttttaccttgaaggttttagttagcttagcataagtttatttttctaaataaggaatctgattgcctcacaactcagatgtatcacagttatggtgaaatagcaatatattggtttctgtaaccttttaaataccgtaatgaattaaaatctcttcagcaaaagcaaatatatctagggtgacgagaggtgtttttagtgtatttgaatgatggaaatgtttttcttaaaatatttctgaagcattttttaaaataattttttgaatttattgatgatagtagttgtgtgttagtgtgaatgactggtctaaatgtgtatgtcacttccaagggattagtaggggtcagaatgatttgttttattcattgacttttcctttgacgtgttcttattcattgggctacatacattccctgttgccttctcaccaaaagtgccactacacaggctgtatttcattgtactgtagaaaaagacaagtagacctttttcattcatgagattcctatgaaatctgttggtggaggtataaaatgaggagacttttatgggctagctagtaggagttttgctgtgaaacctttgtaacaggtctatcaggaactagggagagaaataaatgcaggaaatacttgatcccattaaactgaggatgaaaaagacatgataatattttggggattatttattgtgtgattttccggctgatcagaagtgttaattttttgttatacttgtgtcaaatacatatatatatatatattttgaaatggagtcttgctctgtcacccaggctggagtgcagtggtgcgatctgggttcactgcaacctctgcctccaggttcaagtgatcctcctgcctcagcctcccgagtagctaggactacaggcacgtgccaccacgccctgctaatttttgtattcttagtggagatggggtttcaccatgttggccaggctggtcttgaactcctgacctcaagtgatcttcccaccttggcctttctgaactatttcctttacacacatttagaactacatctaactgtattatagttttcactttcaccatcagacaaaattcagaagattcaagagaaggaaagtcgattgtatttactcatatttttgctaccgtgtttttacatctcatattttaaggctctcttaattatttattttctgtttagttaatttcctctagccattctttatttatagtgggtctgctggtaacaaattctctcaatttttcctcgtctgagaatgtcttgacttcccttccatttttgtcagcacctgaaaaatactatgccactatcttctgggttctgtggtttctgatgagaactccactgtcagtctaattgtcgttataaatgcagtgttctctctctctctctgcttccaggatattttttcttttttttttttttttttttcttgagacggagtctcactctgtcgcccaggctggagtgcagtggcgcaattttggctcactgcaagctctgcctcccgggttcaagcgattactcccactttagcctcccaagtagctaggactacaaggcacaccaccatgcctggctaatttttgtatttttagtagagacggggtttcaccatgttgcccaggctggtctcgaactcctgacatcaagtgatcttcctgcctccgcttcccaaagtgctggaattacaggcgtgagccactgctcccagcctctttattttttcagctttactctttcttctgtctttttgacatgtgtgtccagtgacacacgtgttagattttgctatagtctcacgcacgggtctataaggctctgttttttgtttcattttgtttttcctattttctctctattcagatcgagtaatttccactgttcagttttatcatagctgcttttaaatctttgtcaggtaattctgtcatctaagttttggcacctattgattatcttttgcattgtttttgtttttgtttctgtttttgttttgagatggagtcttgctctgttgcccaggttggagtgcagtggcactgatctcggctcactgcaacctcctcctcccgggttcaagtggttctcctgcctcaacctccttagtagctgggattacaggcatgtgccaccacgcccggctaattttgtatttttagtagagaccaggtttatccatgttggtcaggctggtctcaaactcccaacctcaagtgatccgcctgcctcgacctcccaaagtgctgggattacaggcgtgaaccactgcacccagcctatcttttgcattgttttaaatcttgttcttgctaggatgaatgattttctgttaaaactagatattttcatattatgttcctaggctctggatattatctaaaccttctgtttccactggcttttattgacactgctttggcaaggtcatagggggtgcctcattactgccaggtggacatagaagtcaagggtccctactcagcctctactgatgcctcaggaagaggatccttcttgttattgctgggtgggggtggaagtctagctgacacctactgaggtaggtgctggggcatgcccggccatcagggtgaaagtcctggctccctagttggcctacttttacattgccctaatagggcattggagctcctcactatggtttatgagctggaagtcaaggctcctcacttagctttcgttggtgtgggtggtggtggggcaaaactgttttctgggtttggctggagtggagcagttactgtcaaaagttttctgtcttgccaggctgtccctttcttgtttctttggctagagagagcaagcttttgttgtggctctttttgtctgtgccagttggcatttccaggttgctgccttctttagctccaagtctgggatatattaggcaaaaagaaaacccagagaatttacaccaccgtgtcattccatgggtcctgaggtcccttacttagtctgccttctctccacttttcacagtcttctcatgttttgtatataatgtccagggtctttagttatacttagcagaaataaaagggaaaagtatgtctgctctatgcttctgtaagtggaagtcttcaaatttgcatttttgattcctttaaacagttttgtaaaatatataatcattattgggcaaaatgtcccataaaatgtatataccttgtgatggtttgcataatattgtgttcaagaggactgctgaaaaataacatctttatttaaactgaaacgaattgttcacattattaatgaaaacttttcccctctaggaaataatgcaaaaggtgtcccaaggctcctgaccagtgaacaaagatttgagaaagacagccaagctcatgttttctcctgatcaagaaaatcatccatctaaagcaccagtaaaatatggtgaactcattgtcttaggctataatgggtctctcccaaatggcgatagaggaaggaggaaaagtaggtttgctttgtttaaaagacctaaggcaaatggggtgaagcccagcactgtgcatattgcttgtactcctcaggctgcaaaggcaataagcaacaaagaccagcatagcatatcatatactttgtctcgggcccagactgtggtggttgaatatactcatgacagcaacacagatatgtttcagattggccggtcgactgaaagccccattgattttgtagtaactgacacggttcctggaagtcaaagtaattctgatacacagtcagtacaaagcactatatcaagatttgcctgcagaatcatatgtgaacggaatcctccctttacagcacggatttatgctgcaggatttgactcatcaaaaaacatctttcttggggagaaggctgccaaatggaagacatcagatggacagatggatggcttgaccactaatggtgttcttgtgatgcatccacgcaatgggttcacagaagactccaagcctggaatatggagagaaatatcggtgtgtggaaatgtatttagcctacgtgaaaccagatcggctcagcagagaggaaaaatggtggaaattgaaaccaatcagttacaagatggctcgttaattgacctctgtggtgcaacattgttatggcgtactgcagaaggcctttcccacactcctaccgtgaagcatttagaagctttaagacaggaaatcaatgcagcacgacctcagtgccctgtagggttcaacacactagcatttcctagtatgaagaggaaagacgttgtagatgaaaaacaaccatgggtatatctaaactgcggccatgtacatggctatcataactggggaaacaaagaagaacgtgatggaaaagatcgtgaatgtcctatgtgtaggtctgttggtccctatgttcctctgtggcttggatgtgaagctggattttatgtggacgccggccctccaacccatgcgtttagcccgtgtgggcatgtgtgttcagaaaagacaactgcctattggtcccagatcccacttcctcatggtactcatacttttcatgcagcctgtcccttttgtgcacatcagttggctggtgaacaaggctacatcagacttatttttcaaggacctctagactaacagaccattgtcttgcaggactacattataaatttataagctaagtgagttgggttttcgaacctgttgtccacgtcacagtttttctgctctggtcatttgcattaagatgaagaattttttaaaacatttataataaatagtagcaatttctgagcaaaaatctgggaaactcaagcaaaggaatttctgaaagtatcagtcttctgaattctgagttttgaaaatatattttgaggagaaaaagacatagtctaatttgatgccttccttttagtgtttttgaatcacctatcctcagtgctgaaattgttttgtataactgagggtactgttggttcaaactatgttagtttacagtttgttgcaaacattgtaaaatacagcgacatgtatattaacttttttctatttatctttattatagaaaataccttagaatgttcttgatagagtagcatggtaacgatggtgtcacacccttggtgtgaatggtagcttagtgagcaacctagctcaaggatttgcaaagttaggaagaaggacgagagagcctctctccccaccccaatctaaatatggaatttggtaaattagaatactttgtaatttgtaagaccaaattcatactaattacccgcgtgaaaggtgtttgtttttaacaacattgaagataatcaggaaagattttttcttaatgtttctctcgagcgtagtactataacaaaaacttaatgctaagaaacattttatatgctcctttggatatgcaatttaatctagattatctatttttctcccatgataactaatctgtttttagtatcagcagcatttggcaagtttattttttggatataaactgtggttcatctgttcactgtttctagaaaaaaatcattgccataagaaaaagtataaattagcaagaaaggagagtgacttgatttgcttttggaaaaagaaatgcttaattaattattctgtatttggccttattcgggcattaggaaatctagagatctaaagggttgaatgacaatagtgcccccgtttttagcagaccagccttaactctgggtttgaatcctaaggagattgccacagtgagacttaaggaaatgtttggttggcagatgagcaccaatgactgcagcgtggagtgacgcactgcatggtctgtttattctctaattccaatatgtcttttgcttccagaagcaagaaaagtttcttctctcccctccttcccacccttttttcaaaggcaccacaagtatagacagttgcactacatcaaatctttttttgacacttgtagaaaccagtacacttttagattagacagtatcttcttttaatattttgatttgttttcctttagtttgaaaagttgtataatacttaactgactgtagcaaagttttatatgtggtagcatacctttaatttatcctattacaaaactgttctgaattttcttttggtttttaaaaaacaaaacttgttgcttagaagccatgaattattttattttacttcaactgtcgaaacttccttgttttaaaaaatgatcatttgggttcactcaggaaatgcatgtcaggaaacttgtattataagtttattagttgtgatgtatcagtaactgctgttacccctttttcaaagaaatgtaattgattttgaagttttctagattgtcacatgctttgtgactaatgcaagaaagcaagtcctgtgttgtatttgttctagtcatttttattcaggctatatattgtagcttaatttttatttgcaattaatttatttaaactaagtaaatacttttcaaaata

SEQ ID NO: 285 - DNA, 12684 bp, Homo sapiens; identical to SEQ ID NO: 74

SEQ ID NO: 286 - DNA, 7171 bp, Homo sapiens
cgggcatgctcagtgggccgggccggcaggtttgcgtggccgctgagttgccggcgccggctgagccagcggacgccgcgttccttggcggccgccggttcccgggaagttacgtggcgaagccggcttccgaggagacgccgggaggccacgggtgctgctgacgggcgggcgaccgggcgaggccgacgtggccgggctgcgaaagctgcgggaggccgagtgggtggccgcgctcggagggaggtgccggtcgggcgcgccccgtggagaagacccgggcggggcgggcgcttcccggacttttgtccgagttgaattccctccccctgggccgggcccttccggccgcccccgcccgtgccccgctcgctctcgggagatgtttatttgggctgtggcgtgaggagcgggcgggccagcgccgcggagtttcgggtccgaggagcctcgcgcggcgctggagagagacaagatgtccgccagagctgcggccgccaagagcacagcaatggaggaaacagctatatgggaacaacatacagtgacgcttcacagggctcctggatttggatttggaattgcaatatctggtggacgagataatcctcattttcagagtggggaaacgtcaatagtgatttcagatgtgctgaaaggaggaccagctgaaggacagctacaggaaaatgaccgagttgcaatggttaacggagtttcaatggataatgttgaacatgcttttgctgttcagcaactaaggaaaagtgggaaaaatgcaaaaattacaattagaaggaagaagaaagttcaaataccagtaagtcgtcctgatcctgaaccagtatctgataatgaagaagatagttatgatgaggaaatacatgatccaagaagtggccggagtggtgtggttaacagaaggagtgagaagatttggccgagggatagaagtgcaagtagagagaggagcttgtccccgcggtcagacaggcggtcagtggcttccagccagcctgctaaacctactaaagtcacactggtgaaatcccggaaaaatgaagaatatggtcttcgattggcaagccatatatttgttaaggaaatttcacaagatagtttggcagcaagagatggcaatattcaagaaggtgatgttgtattgaagataaatggtactgtgacagaaaatatgtcattgacagatgcaaagacattgatagaaaggtctaaaggcaaattaaaaatggtagttcaaagagatgaacgggctacgctattgaatgtccctgatctttctgacagcatccactctgctaatgcctctgagagagacgacatttcagaaattcagtcactggcatcagatcattctggtcgatcacacgataggcctccccgccgcagccggtcacgatctcctgaccagcggtcagagccttctgatcattccaggcactcgccgcagcagccaagcaatggcagtctccggagtagagatgaagagagaatttctaaacctggggctgtctcaactcctgtaaagcatgctgatgatcacacacctaaaacagtggaagaagttacagttgaaagaaatgagaaacaaacaccttctcttccagaaccaaagcctgtgtatgcccaagttggcaaccagatgtggatttacctgtcagtccatctgatggtgtcctacctaattcaactcatgaagatgggatttcttcggcccagcatgaaattggtaaaattcagaaaaggagatagtgtgggtttgcggctggctggtggaaatgatgttggaatatttgtagctggcgttctagaagatagccctgcagccaaggaaggcttagaggaaggtgatcaaattctcagggtaaacaacgtagattttacaaatatcataagagaagaagccgtccttttcctgcttgacctccctaaaggagaagaagtgaccatattggctcagaagaagaaggatgtttatcgtcgcattgtagaatcagatgtaggagattctttctatattagaacccattttgaatatgaaaaggaatctccctatggacttagttttaacaaaggagaggtgttccgtgttgtggataccttgtacaatggaaaactgggctcttggcttgctattcgaattggtaaaaatcataaggaggtagaacgaggcatcatccctaataagaacagagctgagcagctagccagtgtacagtatacacttccaaaaacagcaggcggagaccgtgctgacttctggagattcagaggtcttcgcagctccaagagaaatcttcgaaaaagcagagaggatttgtccgctcagcctgttcaaacaaagtttccagcttatgaaagagtggttcttcgagaagctggatttctgaggcctgtaaccatttttggaccaatagctgatgttgccagagaaaagctggcaagagaagaaccagatatttatcaaattgcaaagagtgaaccacgagacgctggaactgaccaacgtagctctggcattattcgcctgcatacaataaagcaaatcatagatcaagacaaacatgctttattagatgtaacaccaaatgcagttgatcgtcttaactatgcccagtggtatccaattgttgtatttcttaaccctgattctaagcaaggagtaaaaacaatgagaatgaggttatgtccagaatctcggaaaagtgccaggaagttatacgagcgatctcataaacttcgtaaaaataatcaccatctttttacaactacaattaacttaaattcaatgaatgatggttggtatggtgcgctgaaagaagcaattcaacaacagcaaaaccagctggtatgggtttccgagggaaaggcggatggtgctacaagtgatgaccttgatttgcatgatgatcgtctgtcctacctgtcagctccaggtagtgaatactcaatgtatagcacggacagtagacacacttctgactatgaagacacagacacagaaggcggggcctacactgatcaagaactagatgaaactcttaatgatgaggttgggactccaccggagtctgccattacacggtcctctgagcctgtaagagaggactcctctggaatgcatcatgaaaaccaaacatatcctccttactcaccacaagcgcagccacaaccaattcatagaatagactcccctggatttaagccagcctctcaacagaaagcagaagcttcatctccagtcccttacctttcgcctgaaacaaacccagcatcatcaacctctgctgttaatcataatgtaaatttaactaatgtcagactggaggagcccaccccagctccttccacctcttactcaccacaagctgattctttaagaacaccaagtactgaggcagctcacataatgctaagagatcaagaaccatcattgtcgtcgcatgtagatccaacaaaggtgtatagaaaggatccatatcccgaggaaatgatgaggcagaaccatgttttgaaacagccagccgttagtcacccagggcacaggccagacaaagagcctaatctgacctatgaaccccaactcccatacgtagagaaacaagccagcagagacctcgagcagcccacatacagatacgagtcctcaagctatacggaccagttttctcgaaactatgaacatcgtctgcgatacgaagatcgcgtccccatgtatgaagaacagtggtcatattatgatgacaaacagccctacccatctcggccaccttttgataatcagcactctcaagaccttgactccagacagcatcccgaagagtcctcagaacgagggtactttccacgttttgaagagccagcccctctgtcttacgacagcagaccacgttacgaacaggcacctagagcatccgccctgcggcacgaagagcagccagctcctgggtatgacacacatggtagactcagaccggaagcccagccccacccttcagcagggcccaagcctgcagagtccaagcagtattttgagcaatattcacgcagttacgagcaagtaccaccccaaggatttacctctagagcaggtcattttgagcctctccatggtgctgcagctgtccctccgctgataccttcatctcagcataagccagaagctctgccttcaaacaccaaaccactgcctccacccccaactcaaaccgaagaagaggaagatccagcaatgaagccacagtctgtactcaccagagttaagatgtttgaaaacaaaagatctgcatccttagagaccaagaaggatgtaaatgacactggcagttttaagcctccagaagtagcatctaaaccttcaggtgctcccatcattggtcccaaacccacttctcagaatcaattcagtgaacatgacaaaactctgtacaggatcccagaacctcaaaaacctcaactgaagccacctgaagatattgttcggtccaatcattatgaccctgaagaagatgaagaatattatcgaaaacagctgtcatactttgaccgaagaagttttgagaataagcctcctgcacacattgccgccagccatctctccgagcctgcaaagccagctcattctcagaatcaatcaaatttttctagttattcttcaaagggaaagcctcctgaagctgatggtgtggatagatcatttggcgagaaacgctatgaacccatccaggccactccccctcctcctccattgccctcgcagtatgcccagccatctcagcctgtcaccagcgcgtctctccacatacattctaagggagcacatggtgaaggtaattcagtgtcattggattttcagaattccttagtgtccaaaccagacccacctccatctcagaataagccagcaactttcagaccaccaaaccgagaagatactgctcaggcagctttctatccccagaaaagttttccagataaagccccagttaatggaactgaacagactcagaaaacagtcactccagcatacaatcgattcacaccaaaaccatatacaagttctgcccgaccatttgaacgcaagtttgaaagtcctaaattcaatcacaatcttctgccaagtgaaactgcacataaacctgacttgtcttcaaaaactcccacttctccaaaaactcttgtgaaatcgcacagtttggcacagcctcctgagtttgacagtggagttgaaactttctctatccatgcagagaagcctaaatatcaaataaataatatcagcacagtgcctaaagctattcctgtgagtccttcagctgtggaagaggatgaagatgaagatggtcatactgtggtggccacagcccgaggcatatttaacagcaatgggggcgtgctgagttccatagaaactggtgttagtataattatccctcaaggagccattcccgaaggagttgagcaggaaatctatttcaaggtctgccgggacaacagcatccttccacctttagataaagagaaaggtgaaacactgctgagtcctttggtgatgtgtggtccccatggcctcaagttcctgaagcctgtggagctgcgcttaccacactgtgatcctaaaacctggcaaaacaagtgtcttcccggagatccaaattatctcgttggagcaaactgtgtttctgtccttattgaccacttttaactcttgaaatataggaacttaaataatgtgaaactggattaaacttaatctaaatggaaccactctatcaagtattataccttttttagagttgatactacagtttgttagtatgaggcatttgtttgaactgataaagatgagtgagcatgcccctgaaccatggtcggaaaacatgctacacactgcatgtttgtgattgacgggactgttggtattggctagaggttcaaagatattttgctttgtgatttttgtaatttttttatcgtcactgcttaacttcacatattgatttccgttaaaataccagccagtaaatgggggtgcatttgaggtctgttctttccaaagtacactgtttcaaactttactatggccctggcctagcatacgtacacattttattttattatgcatgaagtaatatgcacacattttttaaatgcacctggaatatataaccagtgttgtggatttaacagaaatgtacagcaaggagatttacaactgggggagggtgaagtgaagacaatgacttactgtacatgaaaacacatttttcttagggaaggatacaaaagcatgtgagactggttccatggcctcttcagatctctaacttcaccatattaccacagacatactaaccagcagaaatgccttaccctcatgttcttaattcttagctcattctccttgtgttactaagtttttatggcttttgtgcattatctagatactgtatcatgacaaagactgagtacgttgtgcatttggtggtttcagaaatgtgttatcacccagaagaaaatagtggtgtgatttggggatatttttttcttttcttttcttttctttttttttttttttgacaaggggcagtggtggttttctgttctttctggctatgcatttgaaaattttgatgttttaaggatgcttgtacataatgcgtgcataccacttttgttcttggtttgtaaattaacttttataaactttaccttttttatacataaacaagaccacgtttctaaaggctacctttgtattctctcctgtacctcttgagccttgaactttgacctctgcagcaataaagcagcgtttctatgacacatgcaaggtcattttttttaagaaaaaggatgcacagagttgttacatttttaagtgctgcatttaaaagatacagttactcagaattctctagtttgattaaattcttgcaaagtatccctactgtaatttgtgatacaatgctgtgccctaaagtgtatttttttactaatagacaatttattatggcacatcagcacgatttctgtttagataatacaccactacattctgttaatcattaggtgtgactgaatttcttttgccgttattaaaaatctcaaatttctaaatctccaaaataaaactttttaaaataaaaaaaaa

SEQ ID NO: 287 - DNA, 5780 bp, Homo sapiens
gcggccgctgctcgcgctgaggtgcgtcggtgcccggccccccgcgcccccgcgcgccgcggctcctgttgacccggtccgcccgtcggtctgcagcgcggctgaggaaacttggctgtaacttcaaaagaagatttgattctttatttctggactgcatatatatatataacaaggccattaaaatgtcgggagcctcagtgaaggtggctgtccgggtaaggcccttcaattctcgagagaccagcaaggaatccaaatgcatcattcagatgcaaggcaactcgaccagtattattaacccaaagaatccaaaggaagctccaaagtccttcagcttcgactattcctactggtctcatacctcacccgaagatccctgttttgcatctcaaaaccgtgtgtacaatgacattggcaaggaaatgctcttacacgcctttgagggatataatgtctgtatttttgcctatgggcagactggtgctggaaaatcttatacaatgatgggtaaacaagaagaaagccaggctggcatcattccacagttatgtgaagaactttttgagaaaatcaatgacaactgtaatgaagaaatgtcttactctgtagaggtgagctacatggaaatttactgtgaaagagtacgagatttgctgaatccaaaaaacaagggtaatttgcgtgtgcgtgaacacccacttcttggaccctatgtggaggatctgtccaagttggcagttacttcctacacagacattgctgacctcatggatgctgggaacaaagccaggacagtggcagctacaaacatgaatgaaacaagtagccgttcccacgctgtgtttacgattgttttcacccagaagaaacacgataatgagaccaacctttccactgagaaggtcagtaaaatcagcttggtggatctagcaggaagtgaacgagctgattcaactggtgccaaagggactcgattaaaggaaggagcaaatattaataagtctcttacaactttgggcaaagtcatttcagccttggccgaggtgagtaaaaagaagaagaaaacagattttattccctacagggattctgtacttacttggctccttcgagaaaatttaggtggcaattctcggactgcaatggttgctgctctgagccccgcggatatcaactacgatgagactttgagcactctgagatatgcagatcgtgcaaaacaaattaaatgcaatgctgttatcaatgaggaccccaatgccaaactggttcgtgaattaaaggaggaggtgacacggctgaaggaccttcttcgtgctcagggcctgggagatattattgatacatccatggggtccctcacttcatccccatcttcctgctcactcagtagtcaggtgggcttgacgtctgtgaccagtattcaagagaggatcatgtctacacctggaggagaggaagctattgaacgtttaaaggaatcagagaagatcattgctgagttgaatgaaacttgggaagagaagcttcgtaaaacagaggccatcagaatggagagagaggctttgttggctgagatgggagttgccattcgggaagatggaggaaccctaggggttttctcacctaaaaagaccccacatcttgttaacctcaatgaagacccactaatgtctgagtgcctactttattacatcaaagatggaattacaagggttggccaagcagatgctgagcggcgccaggacatagtgctgagcggggctcacattaaagaagagcattgtatcttccggagtgagagaagcaacagcggggaagttatcgtgaccttagagccctgtgagcgctcagaaacctacgtaaatggcaagagggtgtcccagcctgttcagctgcgctcaggaaaccgtatcatcatgggtaaaaaccatgttttccgctttaaccacccggaacaagcacgagctgagcgagagaagactccttctgctgagaccccctctgagcctgtggactggacatttgcccagagggagcttctggaaaaacaaggaattgatatgaaacaagagatggagaaaaggctacaggaaatggagatcttatacaaaaaggagaaggaagaagcagatcttcttttggagcagcagagactggacgcggattctgatagcggggacgattctgacaagaggtcgtgtgaagagagctggaaactgattacttctctgagagaaaagctacctcccagcaagttgcaaaccattgttaaaaaatgtggcctcccaagcagtgggaagaaacgtgaaccaattaaaatgtatcagataccccaaagaaggcgcttgagtaaagattccaagtgggtcacaatctcagatcttaaaattcaggctgtcaaagagatttgctatgaggttgctctcaatgacttcaggcacagtcggcaggagattgaagccctggccattgtcaagatgaaggagctttgtgccatgtatggcaagaaagaccccaatgagcgggactcctggagggcagtggccagggacgtctgggataccgtcggtgttggggatgagaagatcgaagacgtcatggccactgggaaaggcagcactgatgtagatgacctcaaggttcatatagacaagctggaagatattttgcaagaagtcaaaaagcaaaataacatgaaagacgaggagataaaagtcttaagaaataaaatgctcaaaatggaaaaagtcttgccactgatcggatctcaggaacagaaaagcccaggaagccacaaagcaaaggagcctgttggtgctggtgttagtagcacctctgagaataatgtaagtaaaggagacaatggagaacttgcaaaagaagaacgtgtttcccagctgatgaatggggatccagcttttagacgtggacgtctgcgctggatgaggcaagagcaaattcggtttaagaacttgcaacagcaggagataacaaagcagcttcgtcggcagaatgtacctcataggttcatccctcctgagaaccggaagccccgcttcccctttaagagcaaccctaaacacagaaactcttggagtcctgggacacatatcatcataacagaagatgaggttatagagcttaggattccaaaagacgatgaagcaaggaaagggaataaagaagagagccaagaaaaagggggtaaaggagcttttaaggatccccagtttccatggggctctcaaggaatgagaagtcaagatcacatccaagttagcaagcagcacattaataatcagcaacagccacctcaactacgttggagaagcaattctctcaataatggccagccgaaaagtacgcgctgccaggcatctgcctccgcggagtcattaaactcccacagtggtcaccccactgctgatgtacagactttccaggcaaagcgccatattcatcaacaccgtcagtcttactgtaattataacactggaggtcagttagagggcaatgcagccacttcctatcagaagcagactgacaaacccagccactgtagccagtttgtgacacctccgcggatgaggagacagttctcagcacccaatctcaaagctggtcgagaaaccacagtataaatcagttactggacaaacttgaaatcatggtggaagaaacagacagtgttagctcatgatttgatttggttctacctttggccttgagttcttattatttacattataaatattaactggttttatattgttaagacaaaacactggtaaaagtttcaacacctcccttttgcttgtataccataaatgggcagtttctgaaattttggataaagcatcaagaactcctttttctgaaacgttcctccttttttagtgcctaattaatatacttacttacacagacttgtcccatcttgatgtaagtttgttatgtttttataatgcctataaattaatctgacatccagaaagacctgcctcttagtttatgcagacattcaaaaggagaatttgataagcagaattaaatgtctgttattcataaatgttagaaattggtttaaaaataataacatgcaactgggtgggcacagctttggatttctcatccacgtctgttcccttctttaaatatgattagaattttcgtaagccaaaactaaaggtcttcaaacatatcttgcaatacatagctttgcatcttccacacaacttccacgtcttcttttattctgtattttacaaaaaactcatataatggttttttcttttgaatgtatcagaatatgtatgaaatttgtcatatcagaatctataaattggcactgtgtctgggattctgtttgtggtttgcattttgaagttcaatgtatcatttgacacacatgcacacaaagtgaactattcaccaaaatcatgccaacagaaataccaacaaaaaacttgtgtagcttgtaaggaggttatttggcttgagagggaagaggtgggacagacatgggggacaaagctacagcatatggctctgtggtgctgcttttttccaatagttgatgaaatagtgaaataaaagttaactttggttgggcttggaataaaggagatgatacataataaactattctttggttagcattagtaatgcttgtagacactcaaacaaggaaggcgaagtcctgatgatgatttattgtatcaatacctcattttatttggttgtggtctcagtttgcctcactggagaatccactaagaaagatggattttaatgggaagaaaagaattattttctacatcgttcctcatctcttgagtttgtcaaaaagttttctaagaggcagtgtgaagagccagagatgtccgaaattgcctgacttcatgttttggaagattcctaagtcacatgaaatcatctatcaaacacttgtcttccaaacggtgtgaaaaactacagccaagatagcagttagcattcaaggaagccttaaagattgtgattatgtttttttttcctttgcgtgtgggcactatgctttattagaacacattatttttaatcatagtattttttctttgcctctaagaaaatactttcttaatgctcagaaagttgcttccaattaatgtttttttccccttaaaaagagaagctttgagagatatttttgctttcatagctagaacagttgaagtcttcaactgaggttttatagcagattagacatgggtaaatgatgtctgtaatgggttgagttactgagatgacaatctcctgtgccatttggtttgaatgtacttgataggctgcttcaaatcagtcacttcaatgcattttgtgtaaacccagttgtccttttttattcctctttagacataaatgtgctaactattcctttctatacacaatttattttctaagattaaaaataataattgctaggtttggtggcacatgcgtacagccccagctacttaggaggctgaagcaggaggatccctagagcccaggagttctgggctgtggtacactatgccagttgggtgtaagtttggcatcaatatggtgatgtccctgaagcaggaaaccacaaacttgcatcaggacgggtgaacccagcccaggttggaaatggagcaggccaaaactcccaggctgatcagtaatgggatcttgcctatgaatagccagtgcactgcagccaggacaacagagtgagaacctgtctttaaaaaaaaaaaaaaaaaaaaaaa

SEQ ID NO: 288 - DNA, 10551 bp, Homo sapiens
gcggccgctgctcgcgctgaggtgcgtcggtgcccggccccccgcgcccccgcgcgccgcggctcctgttgacccggtccgcccgtcggtctgcagcgcggctgaggaaacttggctgtaacttcaaaagaagatttgattctttatttctggactgcatatatatatataacaaggccattaaaatgtcgggagcctcagtgaaggtggctgtccgggtaaggcccttcaattctcgagagaccagcaaggaatccaaatgcatcattcagatgcaaggcaactcgaccagtattattaacccaaagaatccaaaggaagctccaaagtccttcagcttcgactattcctactggtctcatacctcacccgaagatccctgttttgcatctcaaaaccgtgtgtacaatgacattggcaaggaaatgctcttacacgcctttgagggatataatgtctgtatttttgcctatgggcagactggtgctggaaaatcttatacaatgatgggtaaacaagaagaaagccaggctggcatcattccacagttatgtgaagaactttttgagaaaatcaatgacaactgtaatgaagaaatgtcttactctgtagaggtgagctacatggaaatttactgtgaaagagtacgagatttgctgaatccaaaaaacaagggtaatttgcgtgtgcgtgaacacccacttcttggaccctatgtggaggatctgtccaagttggcagttacttcctacacagacattgctgacctcatggatgctgggaacaaagccaggacagtggcagctacaaacatgaatgaaacaagtagccgttcccacgctgtgtttacgattgttttcacccagaagaaacacgataatgagaccaacctttccactgagaaggtcagtaaaatcagcttggtggatctagcaggaagtgaacgagctgattcaactggtgccaaagggactcgattaaaggaaggagcaaatattaataagtctcttacaactttgggcaaagtcatttcagccttggccgaggtgagtaaaaagaagaagaaaacagattttattccctacagggattctgtacttacttggctccttcgagaaaatttaggtggcaattctcggactgcaatggttgctgctctgagccccgcggatatcaactacgatgagactttgagcactctgagatatgcagatcgtgcaaaacaaattaaatgcaatgctgttatcaatgaggaccccaatgccaaactggttcgtgaattaaaggaggaggtgacacggctgaaggaccttcttcgtgctcagggcctgggagatattattgatacatccatggggtccctcacttcatccccatcttcctgctcactcagtagtcaggtgggcttgacgtctgtgaccagtattcaagagaggatcatgtctacacctggaggagaggaagctattgaacgtttaaaggaatcagagaagatcattgctgagttgaatgaaacttgggaagagaagcttcgtaaaacagaggccatcagaatggagagagaggctttgttggctgagatgggagttgccattcgggaagatggaggaaccctaggggttttctcacctaaaaagaccccacatcttgttaacctcaatgaagacccactaatgtctgagtgcctactttattacatcaaagatggaattacaagggttggccaagcagatgctgagcggcgccaggacatagtgctgagcggggctcacattaaagaagagcattgtatcttccggagtgagagaagcaacagcggggaagttatcgtgaccttagagccctgtgagcgctcagaaacctacgtaaatggcaagagggtgtcccagcctgttcagctgcgctcaggaaaccgtatcatcatgggtaaaaaccatgttttccgctttaaccacccggaacaagcacgagctgagcgagagaagactccttctgctgagaccccctctgagcctgtggactggacatttgcccagagggagcttctggaaaaacaaggaattgatatgaaacaagagatggagaaaaggctacaggaaatggagatcttatacaaaaaggagaaggaagaagcagatcttcttttggagcagcagagactggactatgagagtaaattgcaggccttgcagaagcaggttgaaacccgatctctggctgcagaaacaactgaagaggaggaagaagaggaagaagttccttggacacagcatgaatttgagttggcccaatgggccttccggaaatggaagtctcatcagtttacttcattacgggacttactctggggcaatgccgtgtacctaaaggaggccaatgccatcagtgtggaactgaaaaagaaggtgcagtttcagtttgttctgctgactgacacactgtactcccctttgcctcctgaattacttcccactgagatggaaaaaactcatgaggacaggcctttccctcgcacagtggtagcagtagaagtccaggatttgaagaatggagcaacacactattggtctttggagaaactcaagcagaggctggatttgatgcgagagatgtatgatagggcaggggagatggcctccagtgcccaagacgaaagcgaaaccactgtgactggcagcgatcccttctatgatcggttccactggttcaaacttgtggggagctcccccattttccacggctgtgtgaacgagcgccttgccgaccgcacaccctcccccactttttccacggccgattccgacatcactgagctggctgacgagcagcaagatgagatggaggattttgatgatgaggcattcgtggatgacgccggctctgacgcagggacggaggagggatcagatctcttcagtgacgggcatgacccgttttacgaccgatccccttggttcattttagtgggaagggcatttgtttacctgagcaatctgctgtatcccgtgcccctgatccacagggtggccatcgtcagtgagaaaggtgaagtgcggggatttctgcgtgtggctgtacaggccatcgcagcggatgaagaagctcctgattatggctctggaattcgacagtcaggaacagctaaaatatcttttgataatgaatactttaatcagagtgacttttcgtctgttgcaatgactcgttctggtctgtccttggaggagttgaggattgtggaaggacagggtcagagttctgaggtcatcactcctccagaagaaatcagtcgaattaatgacttggatttgaagtcaagcactttgctggatggtaagatggtaatggaagggttttctgaagagattggcaaccacctgaaactgggcagtgccttcactttccgagtaacagtgttgcaggccagtggaatcctcccagagtatgcagatatcttctgtcagttcaactttttgcatcgccatgatgaagcattctccacggagcccctcaaaaacaatggcagaggaagtcccctggccttttatcatgtgcagaatattgcagtggagatcactgaatcatttgtggattacatcaaaaccaagcctattgtatttgaagtctttgggcattatcagcagcacccacttcatctgcaaggacaggagcttaacagtccgcctcagccgtgccgccgattcttccctccacccatgccactgtccaagccagttccagccaccaagttaaacacgatgagcaaaaccagccttggccagagcatgagcaagtatgacctcctggtttggtttgagatcagtgaactggagcctacaggagagtatatcccagctgtggttgaccacacagcaggcttgccttgccaggggacatttttgcttcatcagggcatccagcgaaggatcacagtgaccattatccatgagaaggggagcgagctccattggaaagatgttcgtgaactggtggtaggtcgtattcggaataagcctgaggtggatgaagctgcagttgatgccatcctctccctaaatattatttctgccaagtacctgaagtcttcccacaactctagcaggaccttctaccgctttgaggctgtgtgggatagctctctgcataactcccttcttctgaaccgagtgacaccctatggagaaaagatctacatgaccttgtcggcctacctagagctggatcattgcatccagccggctgtcatcaccaaggatgtgtgcatggtcttctactcccgagatgccaagatctcaccaccacgctctctgcgtagcctctttggcagcggctactcaaagtcaccagattcgaatcgagtcactggcatttacgaactcagcttatgcaaaatgtcagacacaggtagtccaggtatgcagagaaggagaagaaaaatcttagatacgtcagtggcatatgtgcggggagaagagaacttagcaggctggcggccccgtggagacagcctcatccttgagcaccagtgggagctggagaagctggagctcctacatgaggtggaaaaaacccgccactttttgctgctgcgtgagagacttggtgacagcatccccaaatccctgagcgactcgttatcccccagcctcagcagtgggaccctcagcacctccaccagtatctcctctcagatctcaaccactacctttgaaagcgccatcacacctagcgagagcagtggctatgattcaggagacatcgaaagcctggtggaccgagagaaagagctggctaccaagtgcctgcaacttctcacccacactttcaacagagaattcagccaggtgcacggcagcgtcagtgactgtaagttgtctgatatctctccaattggacgggatccctctgagtccagtttcagcagtgccaccctcactccctcctccacctgtccctctctggtagactctaggagcaactctctggatcagaagaccccagaagccaattcccgggcctctagtccctgcccagaatttgaacagtttcagattgtcccagctgtggaaacaccatatttggcccgagcaggaaaaaacgaatttctcaatcttgttccagatattgaagaaattagaccaagctcagtggtctctaagaaaggataccttcatttcaaggagcctctttacagtaactgggctaaacattttgttgtcgtccgtcggccttatgtcttcatctataacagtgacaaagaccctgtggagcgtggaatcattaacctgtccacagcacaggtggagtacagtgaggaccagcaggccatggtgaagacaccaaacacctttgctgtctgcacaaagcaccgtggggtccttttgcaggccctcaatgacaaagacatgaacgactggttgtatgccttcaacccacttctagctggcacaatacggtcaaagctttcccgcagatgcccgagccagtcgaaatactaagtgactctgccgagtgccctcactcgccttcgagagataaagaaagcgttacctctcatttctctttgtgattcttgacggtgactcttgtatgtaatcctgtggcttaactacttctccctccttgtccagcacttttctagctctcccgttccccatctccattgctctgtactcttttcttttttcttgtgctgagaatctcgttagtagcatgtggcctaacaaaaggaaaaaatgtttttaaacacacacacacacacacacacacacacacacatacacagacaaaaacacaaaaactctgaggggatctggtgaatctccaaattattgtgggtgtactttggcttccttttgtatgataggtccccatcatgaccacctctgatgtctgtgctgctgtcaccaggcacctttgtttttcaagacaacatactttttttttcttttctctgtttgtgatatcactttaatttttcttgggtggcttagagactaagggaggagacatctggcctttttagaacctgagaggaaaaaaagagtctttttttcccctctgtctctttttgccatggctaatccctgcatttccattcagggaaaaggtggtagtgagcatagaactgcaacagttatattctgagtcaaagttggggctttttacggcataattatggaatttttatttactggtagagaggagacgagaggctttttcagtgggcctgggacagtggctgctcttgactttgtgtgaagggaaatgccaaggatgcttctggtggacttcaggggaccccagggtttggccgtgggccgtgatggcagcaggcggtgggatgcttgtagctcctcacagcaggattcctgcccactgttttttctctgttgggagggaagctcttttctaggagtgtctcagttctgcttttggcattagtgatggtggtggtacagttggaattagtgccatgtcatacacaaatgttccacaaggcgggagtgtttcactttctggtgataaacttgatggtcattgttatgattaagataatgccgggcaggccgggcacagtggctcacgcctgtaatccaagcacttggggaggccgaggcgggcagatcacgagatcaggagttcaagaccagcctggccaatatgatgaaaccccgtctctactaaaaatacaaaattagtcgggtatggtggcacatgcctgtaattccagctgcttgggagcctgaggcaggagaactgcttgaacccaggaggcagaggttgcagtgagccaagatcgcgctattgcactccagcctgggtgacagagcaagactctgcctcagaaaaaaaaaaaaataataatgctgggtagtgaccttgtgattgttacagctccctttgatcaaagaaatatagctttcaggcataaacctggaagtctccctctgaatccagcagttgttttcattgatgcttgtcaggttgaagatgctttcagtgatgctctctatactcataaataagcaaatgtggcaggctttgctttctggatcccaggattaaaactaaccgtgaccactactccaaacaaaacacaatatgcctaggggcacggatgaacgtccagggagcccgggccccaggctttgttgcgtgttccctgctcctctccatctggtgtggaaacactgcccagggagaaaggaggaagctcactgtggacagtcttctttccttctgacagaccaggtcatctggcttccgagatcatcagagaagataagtctgtctctttcagctgccagtaagttttccaggatgagaggggaaaaagaaagcctccagtgacttcagttgctttgccagttgtcttgggattgttttacaccatcctttacttcccttgctcagacctctctgtttcaccattgctcaggcattcaggaaagtatctgctcactcccacttggtgagtcctcggccttgaggttgctgactctcaggcgttaggcagctggatgacttcccgcttcacgcagcaaaggccaggggcttgcgcgcctctgcagagttgttgctagggagacttgtgtcatcatccacaaccttgtttctcacttcctggttgggctcatctctgaagaacaggtctcccagcttcgctccttatcactgcattgtgaagaggaggaaaagtgaatcacggagagagaaaggaaaggatagaatcacaggctgcgtctgcacctgaaaagtgacccgcggaaactctatggcggattttttttttaactttcttcttcctgttaaaacataggtcactaactgtgatgttatttgttttctaagtggtatgtgagattttctaatgtagttagaagtttcattgtctgatggacacaatatgcccttccggttctattcaaaccagcaggatctgtcggtgcttagagatggctgcctggactggaatcaaatctaatttcagggaaatgaagatggaatttgaaggtcacttttaaaattaagtcattgatgctgctgttacagagtgtgacagaggatccatgtctgtgacacaggacggtgggaagcctgagagagagtgaaattatgtgatacactgaaatgacttttgtttttcttctaactcatacaaaactggtttggaaagtctttgctttggaagcgtcagacattagaacaggccaaactggactgtctgttcatagcgtgcctgaataagaaggcctcttagggagccagagggagcagagtggtcgtgtcctgcgtgctcttcaccctctggggcgcccctgctgcggctggcaggtgcagacagcctttgctggtccccagcacgtccagggtgggtgctcccttgcccgacagaaccatccccactgtgaggctgtgagagatttgtggcaggaactgtttatgaggctctagttgttgctgttgtggcgggaaagttaagaaacatagcccttaaggaaaccacctttatgtattttcttaaagcacgcctttaaataagcaaaaactttaaaaggcaggaaagagaattcttaggcaaattcagagaaataagtgctagttaatactaatcacctcctcctctgtctctcatcctcctttctcccatcaaagcaaaatatggcctcaccaccagccccaaatcagtgctcagaccctctctgtgtctgtgtgccctcctgggagtcagtcagcgctcaggccaggactgtgcagggccagccagcccatgcgctagtcaggagcacaggcaaggggtgcttgtggcagtggccgggcacctgagccccagctcgttgttaaacgtgctgacggcaaggggcaatggagtgagtttcccaactaagaaaccactattatatattttttcccttcagtcacatagacttcagacaactctcctattttttatggatttttcagctcatttcagatgaaggaactaagtcattgtgaactgtctcttgagatctaaaaacaagatgacttttcctggcacatattccaaagcaaagactttgttgcctgctgcttattgtctaatttacagggatatttaattttgtcaggtctatgtatatttatccagctatacttacttgcacagtggattggagagaaaggattctccagtgtgcacactcatcggtactctttctgcatttccctcgtgctgtgtcccgctcgggttccaatggacagtatcagggcttgtttgacttaggtctttcagttttcctttcggttcccttttaaaaatgtgattgttaacctgcctcttgaaagattcaaccgggtgtggtggctcacgcctgtaatcccagcacattgggaggccaaggcaggtggatcacctgaggtcagaagtttgagaccagcctggccaacatggtgaaaccccgtctctactaaaaatacaaaaagtagccaggcgtggtggcgtgtgcctgtagtcccagctacttgggaggctgaggcaggagaatagcttgaacctgggaggtggaggctgcagtgagttgagactgcaccattgcactccagcctgggtgacaaagcaggactccgtctcaaaaaaaaagaaaagattcatgatgctgctgctcccagaaggtttgctggatgtgtttacataggactctaacttgtgtgcactacagttgttcaccagggccagtgattcaccccagtgtgtggccagaccatgactgtgtagcaggaatgttttaatttgtgcttccttagtaaattgaaatatcagctgagagattatttgctgctgttattcaaaaggccatttatgaagttagtatttgagccccataagatctttaaaaagcctccaatcatttaaaggaagaaatcagagttgctataaaattcagtaaaaagctcatagccaaacggctgtgctcagatggaaagtctgagctgaggttggtctcttgccaaaccgtggctgttgtgtgttgttcttcatgtcttcgagttcattttttttcattctgcctattctggcatcagctcacttgaggagtccctcagccttcttgtatttaaggcatcgtcttagactttgtggctctaaagtacctgtctgttgagatttcaagtctcttgtcaccatcctcacacatgacaacaaaacccataatgcataagtggcctttttgaaccaagactttgcaaactgatctctcccccgtgaaggagttgagcacattagcaacaatgtacattaattttggattttcattttcatgttttattttgtaaatattatctgatgtttggagcttgagtatacagactgtaaatatagttcttgtatttgtactaattctgattcttttgctgtatagccttagatgtgcaatgcagacactatctaactgtgtgtggtaaccttgcgtcacggagctgttagtgaacgaggtaaaaataataaaggtacagccagtgcaaaaaaaaaaaaaaaaaaaaaaaaaaaaaaaaaaaaaaaaaaaa

SEQ ID NO: 289 - DNA, 1969 bp, Homo sapiens
gctgcgagacgctaagcggcgccgggcgggagaagagcggagcagtggtcggagatgtggcgaccggtgcagctctgtcatttccactctgctctgctgcacagaaggcagaagccctggccgtcccctgctgtgttcttcaggagaaacgtcaggggccttcctccaaggttctccagccccacacccctgtggaggaaggtgctctccaccgcggtagtgggggcgcccctgctcctcggagcccgctatgtcatggcagaggcacgggagaagaggaggatgcggctcgtggtggatggcatggggcgctttggcaggtctctgaaggtcggcctgcagatctccctggactactggtggtgcaccaatgttgtccttcgaggggtggaagagaacagcccaggctacttggaggtgatgtctgcgtgtcaccagcgggcggctgatgccctggtggcaggggccatcagcaacgggggcctctacgtgaagctgggccaggggctgtgctccttcaaccacctgcttccccccgagtatacccggaccctgcgcgtgctagaggacagggccctcaagcggggcttccaggaggtggatgagttgttccttgaggacttccaggccctcccccacgagctcttccaggagtttgactaccagccaattgctgccgccagcctggcacaggtgcacagagccaagctgcacgatggcaccagcgtggctgtgaaggtgcagtacatcgacctgcgggaccgctttgatggggacatccacaccctggagctcctgctgcggctcgttgaggtcatgcaccccagctttggcttcagctgggtcctccaggacctgaaggggaccctggcccaggagctggacttcgagaatgagggccgcaacgcagagcgctgtgcgcgggagctggcgcacttcccctacgtcgtggtgccccgcgtgcactgggacaagtccagcaagcgcgtgctcactgccgacttctgcgccggctgcaaggtcaacgatgtggaggccatcaggagccaggggctggcagtgcatgacatagcagaaaagctcatcaaggcctttgctgagcagatattttacaccggcttcatccactcggacccacatcctggcaacgttctggtgcggaaaggcccggacgggaaagcggagctggtgctgctggaccacgggctctaccagttcctggaggagaaggaccgcgcagccctctgccagctgtggcgggccatcatcctgcgggacgacgccgccatgagggcgcacgcagccgcactgggggtgcaagactacctcctgttcgccgagatgctcatgcagcgccccgtgcgcctggggcagctgtggggctcgcacctactgagccgcgaagaggcggcctacatggtggacatggcccgcgagcgcttcgaggccgtcatggcggtgctcagggagctgccgcggcccatgctgctggtgctgcgcaacatcaacaccgtgcgcgctatcaacgtggccctcggcgcccccgtggaccgctacttccttatggctaaaagggctgtccggggctggagccgcctggcgggcgccacgtatcggggtgtctacggcaccagcctcctgcgccacgccaaggtcgtctgggagatgctcaagtttgaagtggcgctcaggctggagaccttggccatgcggctgaccgccctcctggctcgtgctctggtccacctgagcctcgtgcccccagcggaggagctctaccagtacctggagacctagggtgcagccgcccagggccggcggggcccttttcaccttgggctgacggaggtggcggggctagaggtgtagacaccccgagccccgtgggcactcgcactggggggctgtgacagcagctgggccaggaggccgtgtaatgaccacacactcctctcaagcaaaaaaaaaa

SEQ ID NO: 290 - DNA, 5862 bp, Homo sapiens
gtctgtctgtgtctcgcagcggcgcgcggccccggacaagcgctggggattcccgtttgaggcgtcactactgtcactgccatcaccccacggagccacttctagaggggagtagacccggcccttcgccgggcagagaagatgttgcccctgtccatcaaagacgatgaatacaaaccacccaagttcaatttgttcggcaagatctcgggctggtttaggtctatactgtccgacaagacttcccggaacctgtttttcttcctgtgcctgaacctctctttcgcttttgtggaactactctacggcatctggagcaactgcttaggcttgatttccgactcttttcacatgtttttcgatagcactgccattttggctggactggcagcttctgttatttcaaaatggagagataatgatgctttctcctatgggtatgttagagcggaagttctggctggctttgtcaatggcctatttttgatcttcactgctttttttattttctcagaaggagttgagagagcattagcccctccagatgtccaccatgagagactgcttcttgtttccattcttgggtttgtggtaaacctaataggaatatttgttttcaaacatggaggtcatggacattctcatggctctggccacggacacagtcattccctctttaatggtgctctagatcaggcacatggccatgtcgatcattgccatagccatgaagtgaaacatggtgctgcacatagccatgatcatgctcatggacatggacactttcattctcatgatggcccgtccttaaaagaaacaacaggacccagcagacagattttacaaggtgtatttttacatatcctagcagatacacttggaagtattggtgtaattgcttctgccatcatgatgcaaaattttggtctgatgatagcagatcctatctgttcaattcttatagccattcttatagttgtaagtgttattcctcttttaagagaatctgttggaatattaatgcagagaactcctcccctattagaaaatagtctgcctcagtgctatcagagggtacagcagttgcaaggagtttacagtttacaggaacagcacttctggactttatgttctgacgtttatgttgggaccttgaaattaatagtagcacctgatgctgatgctaggtggattttaagccaaacacataatatttttactcaggctggagtgagacagctctacgtacagattgattttgcagccatgtagtgaatggaaagaaattatgcaccttttatggaccaaatttttctggtactgtacgatccaaaacattgtacccagctttttaaaagagagaaattatcactacaactcccgagcactaagtagacggggtagagtcagccgttcatgctttgtggggagttcacagctaagggatcagatttaagaggatatctcctggacttttggtcttttcttttgtgctctttcctccaaatctttttgacttctgaggtttttagcttaggatgttaatttgtccttttgtctttctttttttgtttttgttttctgtttgtttgttttcatgttgaatgcccacaccaccatcctctcatcccagccagtaagaatttcagttgtgggcctccagtcttctggaatgtcttcactgcagctgctggaaatcactgctttcattcccacaaaaccagtattacttttttttaaaaaaagaaagaaattggaaatctgtgctatacgtaatgtcataattgttgacgttcttcagtataatcatgtttgttaaattgtttgtaccttgcaaacttatgaaccaaaccatattgggttttcaaagtgcctttgtatccaaaaatgtatttgccagcatagaaatgtaccatcaagagtcatgtatgttttatttttgtttttattttttattttttgagatggagtctcgctctgtagccaggctggagtgcagtggcataatctcagctcactgcaacctctgcttcccgggttcaagctattctcctgcctcagccttctgagtagctgcgactatgggcgtgtgccaccatgcccagctaatttttgcatttttagtagagatggggtttcaccatgttggccaggatggtcttgatctcttgacctcgtgatccgtccacctcagcctcccaaagtgctgggattacaggtgtgagccaccacgcccggctatgtttttttttttttttttttttttaacaatggatattctgtaaaatatcctgtacaaaacaagactattgccagtaatgtatacaaattgtctttttgtgtacttccagcataggtttggatatatgaacatttttcttttattgttttatcttcacagaaaataaaaggtgttaatttgctttttaaaacaaatttaattatcacattttaaattactttgtggactgtgttttcaaaactttgcaaattcatctgttacacagaaaattttgacttaaaacatctgctgaattccaaatttctgtaatagctactgtatctgtgataaactttcctatatctttccttgccatttctatggattttataatgaaagaaaaaggcattggagactgaaggcagaaatggttgtgacagtgctgtttggctttttcattcttcaaatgccaagtcatccactttgttttcctgtttaggctttgcacaaatacaattgctttcaggaatcctaaagcagcattttattgagtttgaattattaaaggtacagaggaaatgtggtgatgtagaacttttcctaacacaggtatctaggaagtaagtgctgagttgattttctaggttcttacgtatttgaaaaataaaattgcaattcgagataagtgcttgagcactctacttaagtattctctgtgttttatgaagagaaaatgatctgattttcccttatacttcattttacaatacatattcccttttaacttaaaaaaattgtaaatgtgggagaaaaaaccctgcaggatggaaacaattattaagaatgtagatcaataagtactttttagtgatgtggcagaaatccctgttgattctaagttttagagtgtcttttcccctatttctgacctacaactataaactactctctattaggagaactagaccactttcttcattcttttctaaactgctgcagattgccgtgaactctatcaatagtctcttttccgcaggcaaagtggcattttctaaacatgtttgcttactgccaggtggtttgaaatctatgatttactgcagtagtatgtgcttaaaacaactgttgaggtcttttaagcaggaaagttcaaaaggaagtgtcctgataatggtactggtttttctacaaatataagtagtcattagaagtttgcaaccaccaccaagtctgagagaactctgggatattctgtgggttttggcatattagatagagaaaatgacagatctagatgaagggagcttttggatgtgtgcctttaaaaactgattatgtataaatactgatatttcacatacggagatatttgaagacccaagtctgcctttcacagagccctccattccaagtttagtttttgtcaaaatatgaatcattttatttgactgtactatcagtacacaaatgcatgagtatgtttatacagtgttagactgatgtgaatttgcatttgttacattacattgccagcgcatatcatttagcaagttggcattaacatttatgctttaattaaatgccagtatacctatgtgtgcagcagtaaaaaattagtgagaaaaagcaactttttgtcactcttaggaaatattttgtcttattagtgttcttggcacatgtatattactaaagtagataattccaatgagaaatactaccagattattgttataaaattaatttacaatgtccctgatattgagctaactcttaaaaaaaccaaacaaaactcgtatctgagtgtaactttgccaatattttaaaagccaaaatattctctggacaacaaatttgtattgctcagggacagtttaccttgcctggtaaaccttcccaaacagaaatatagctatactatctttggttttgttttttgttttttttgtttgtttgtattagatggaatttcactcttgtcgcccaggctggagtgtagtggcgcagtctcagctcactgcaacctccacctcccgggttcaagtgattctcctgtctcagctccctgagtaactggaattacaggtgcacgccaccacgcccggctaatttttgtgtttttagcagagacagggtttcaccacgttggccagggtggtcttggactcctgacctcaggtcatcctcctgcctcggcctcccaaagtgctgagactacaggtgtgagccaccgtgctcagccactagctttggttttttaaacatagattatattcctcaagatgaagggcttaacatatccacagcttcctcagtttgctaactccccatgcatctttgtgaaggacagtatctagtttatctgtaggtcagtgttccttgtgctgtcatttcccttatatctggaatttgtcagcattcctgaaaacctacacgtgtatatcagtaaccaaaatgctatgccttttttgcacctttgtacagcagccaaatcatgaactcaaaatgtatttgatcacagttctataatgtttttacctacctattatggaataatcagtttttacagagattattaatatggtagaaccctgttatgtaattccaaaacttaagaaccatatttacattgcttaacacagaattttacatctaagcaaggactggctttagaagcagtgtagttctacctctcattttacagatgagaaaaccgaagcccagaaaaactctcatttgctcaaagtcacagagaaaattagtggcaaagccaaaaagattcagatcttctgactcgaagttgagagttctttatactctattatgctgcctctccagtgtaatatttgcctttctgtaaatgggattaaatatgatttgtaaataaaggacatctgacctccttttttggtacattaaggcactttataaatggacttttattgtctcatttttcgtatataattatttccatcatattctttatggaagatgcaattaattttaacttttttactcttataaaaccagttcctgacattttaaaaaacaatatctgtaaaatggatccttttatgagtgaatttttctgctaattgcccaaggctaaatccaatttaaggattgcttagtttctttattttgtttatggtctctgaactggtatttttttataaaccaggctaattcacaggtcataccatttcattcttgtcgtgttggcttccagtcactggaaaagcttttgcattttaaagatttttagagccatgcaaaactgggcattaaatgttgcataaagcaaatcttttaagtaaggtaaaatgttgaagtcttaaccagaattcctacaactaattactaaaactgctatttctaactcttcatgaaagcattacctttggaaagttaaactttttttttcctttcatcaccgtctttgaaacaaattattttccaattcataagaactttggtaaaaaaaaaaataaaaggaaattatatgtttttctttggacattcattggaaggcttgttgaagacatgatcccccagaagccttagtgacccagatctcaaccagagactcaagatagcctcaaatacagtgaaagattatgtatccaaaaaaaaaaaaaaaa

SEQ ID NO: 291 - DNA, 3642 bp, Homo sapiens
ggcacgagctttggctggctagggaggggatgcaatgatataaacatttatcccctgatacctcatgttaaaatctgatgcccactgtgggacgtggggcctaatggccaccatttgggtcatggtgaccaatcttttatgaatagagagatactgccctctcttgggaatgaatgaattgttgctttattattttccaagagagctagttgttaaaaagaccctggcaacttcctactctctctgttcctctgttaccatgtgttctctgcatataccagctcacctttgtcttctgccatgagtggaagcagcctgaggccctcactaaatgcgcaaacatttccagacatcagaatcttgagccacatgaaccttgtttatataaattagtcagtctcagacatttctttatagcaacacaaaatggaaaaagataacactcgcatcacaggtatgtgtctctggcagctagccaccgttcttaagatatccaggatccactcagccaagagtcttctcatcagtactctaaagacacttatcactcaagagagtctaaggtttttaggagaaaccagggacaaagtctaaatgtttttgtgataactcagattgcccacttttctttgaccacatatcttttacaggaaaaaggattgtaacagtaaagaggtattggcatattatcagagtctcatccattcattcaaaattaggccagtttatcatcctcttgtatgaatatgtctcccagaatgaaatcactcagctttgctgacaacactcaatcttaccaggttccaaaaacaagaatggtctcagggacatacagcttcactcttttaggcatccagtataattgacctaagtgacaatatcttctcttgctcacaccacctttgaggagttaagctaatattgaatttttctcattatataaccctttgatttattcacttgccctcagccactattcctccctctgtccctttatatcagttgtttccaggtttgggagtgacattaggtttgtctgctgggctggcctagactgcaggcagcaatagtattctagcatgtcttccctcagtctagtcttgatcatagagggtaggttatataggtaaggaactagtgggggctatcaagaccaccaggctatataactctacttactgttaatcctaacttttccagatgaaatgaatacttgagaattcttacataaaggtataaaaatatagttatggtttttggcttagggataattcctgtttctggcacttttatttacatccctattcctggtactatggcataacatatgaaaaaataaatttgaggtgaagtgtagtctttattccagcatcctctcctcttcagaagaattgtatgtatcgtcataacagcatcgtcctgatccatcaggtaaaagagaggatgctacctagtggagttattcttgcagccccactcatgttgacagcgagcacattcatgaagatataaaagccagtccttcatgtttatattgcccaacaattagattggcagtttttagacaaacaatgtttcaattgaccatttcaattttctatcaaattttcccctgaggaggacatgtccctctgcattgttggccatttgaggctgtaaagtgtgttttcttgtgtaaagaagtgtgactcggcagtccaaattggtgcaatctcttcttttctggttcttgtatagcccttgaagcattgacatctacccctggttgagcatagcccaatccagagtcagtgattttcctgtcaagatccattggcagctcctttggggttgctggcatcattctggcttgccaggtattatgatcaaagccttcccactagagaatctgtcacatctccatctgctgcctctgtctgttttcttgaccaacagtgaaaaaagagattatgagaaataagataaattaccaaaattgtgaacaaaagagagattatcactaatgacccttaggaagttaaaaaacattataagtgaatactctgaaaaacctgaagccaataagttagaccacttggataaaaaggaccaattcgtgcagagatagaaattgccaaaactgacccaaattaactggaaaacctgaagagaactgtgaactaagtcagaaattgaaaaaccttctcaaaaagaaatgccaaagcccagatatcttcactggtgaattctatcaaatattttgaaagctctttcagacaagaagagaggagggaagactttccagcccatttacagaactggcattaccctcatatcaaagtcacagcaagactcacaggaaaagagtgccatacaccagtgtcaccaataaacataaatgaaaacatccttaacaaacattggcagataatacaaagccacataaaaaaggattacactccatgaccaatgggattcatcccaggaacatatggttggattaacatttgaaaatcagttcatggaatgcactgtattaatggaaaaaaagacataattatctcaaaagatgcaggagaaacagttgacaaaaatgttaacatcactcatgttcataagtttcaacaaaataggaatggaggagaccttcttcactctgataaagggcgtctataaaaaacccacagctaaaatcaaacttaatgaagaaagactgaagactgaatgcttttctcctaagatggggatcaatgcaaggatgtccaatcccaccacttttatttaatattatactggagattgtatccagtgcaataaggcagaaaattaaaaattaaaggcatccagataaaaaggaaaacatacaattctattcacagataacatgaccctgtctgtagaattcacaagcagataaaaactggctagcactaataaatgaatccagaagggcccataggatatcaaatcaatataaaaattaattattaacatatttctctatagaagcaatgaaaatctcaactttcctatcacagtagttaccagaagagcgaaataggaataaatttaggaagacagcagtgtttgttcactgaaaataaaaaaacattcctcagagaaattaaaggtctaaataaatggagagatgcgagttggaaagctcgataatactgttaagatggcagttctcccccagtagatctataggttcaacacaatccctatcaaaatcccagcaggattttatagaaaattgacaaaataggccgggcgcggtggctcatgccggtaatcccagcactttgggaggctgaggcgggcggatcatgagatcaggagatccagaccatcctggctaacacggtgaaaccccgtctctactaaaaatacaaaaaattagccgggcgtggtggcaggctcctcgggaggctgaggcagaaaaatggcatgaacccggtaggcagaagttgcagtgagcggagatcgtgccactgcactccagcctgggtgacagagcgagactccgtctcaaaaaaaaaaaaaaaaaaaaagaaaagaaaaaaagaaaagaaaattgacaaaataatcctaaaaatgtatatgaaaatgcagaggatgcagaagggccaacacaaatttggaaaaaaaaaaaaaaaaaaa

SEQ ID NO: 292 - DNA, 7923 bp, Homo sapiens
gcgcactcgggcacgcgctcggaagtcgggggtcggcgcggagtgcaggctgctcccggggtaggtgagggaagcgcggaggcggggcgcgggggcagtggtcggcgagcagcgcggtcctcgctaggggcgcccacccgtcagtctctccggcgcgagccgccgccaccgcccgcgccggagtcaggcccctgggcccccaggctcaagcagcgaagcggcctccgggggacgccgctaggcgagaggaacgcgccggtgcccttgccttcgccgtgacccagcgtgcgggcggcgggatgagagggagccatcgggccgcgccggccctgcggccccgggggcggctctggcccgtgctggccgtgctggcggcggccgccgcggcgggctgtgcccaggcagccatggacgagtgcacggacgagggcgggcggccgcagcgctgcatgcccgagttcgtcaacgccgctttcaacgtgactgtggtggccaccaacacgtgtgggactccgcccgaggaatactgtgtgcagaccggggtgaccggggtcaccaagtcctgtcacctgtgcgacgccgggcagccccacctgcagcacggggcagccttcctgaccgactacaacaaccaggccgacaccacctggtggcaaagccagaccatgctggccggggtgcagtaccccagctccatcaacctcacgctgcacctgggaaaagcttttgacatcacctatgtgcgtctcaagttccacaccagccgcccggagagctttgccatttacaagcgcacacgggaagacgggccctggattccttaccagtactacagtggttcctgcgagaacacctactccaaggcaaaccgcggcttcatcaggacaggaggggacgagcagcaggccttgtgtactgatgaattcagtgacatttctcccctcactgggggcaacgtggccttttctaccctggaaggaaggcccagcgcctataactttgacaatagccctgtgctgcaggaatgggtaactgccactgacatcagagtaactcttaatcgcctgaacacttttggagatgaagtgtttaacgatcccaaagttctcaagtcctattattatgccatctctgattttgctgtaggtggcagatgtaaatgtaatggacacgcaagcgagtgtatgaagaacgaatttgataagctggtgtgtaattgcaaacataacacatatggagtagactgtgaaaagtgtcttcctttcttcaatgaccggccgtggaggagggcaactgcggaaagtgccagtgaatgcctgccctgtgattgcaatggtcgatcccaggaatgctacttcgaccctgaactctatcgttccactggccatgggggccactgtaccaactgccaggataacacagatggcgcccactgtgagaggtgccgagagaacttcttccgccttggcaacaatgaagcctgctcttcatgccactgtagtcctgtgggctctctaagcacacagtgtgatagttacggcagatgcagctgtaagccaggagtgatgggggacaaatgtgaccgttgccagcctggattccattctctcactgaagcaggatgcaggccatgctcttgtgatccctctggcagcatagatgaatgtaatgttgaaacaggaagatgtgtttgcaaagacaatgtcgaaggcttcaattgtgaaagatgcaaacctggattttttaatctggaatcatctaatcctcggggttgcacaccctgcttctgctttgggcattcttctgtctgtacaaacgctgttggctacagtgtttattctatctcctctacctttcagattgatgaggatgggtggcgtgcggaacagagagatggctctgaagcatctctcgagtggtcctctgagaggcaagatatcgccgtgatctcagacagctactttcctcggtacttcattgctcctgcaaagttcttgggcaagcaggtgttgagttatggtcagaacctctccttctcctttcgagtggacaggcgagatactcgcctctctgccgaagaccttgtgcttgagggagctggcttaagagtatctgtacccttgatcgctcagggcaattcctatccaagtgagaccactgtgaagtatgtcttcaggctccatgaagcaacagattacccttggaggcctgctcttaccccttttgaatttcagaagctcctaaacaacttgacctctatcaagatacgtgggacatacagtgagagaagtgctggatatttggatgatgtcaccctggcaagtgctcgtcctgggcctggagtccctgcaacttgggtggagtcctgcacctgtcctgtgggatatggagggcagttttgtgagatgtgcctctcaggttacagaagagaaactcctaatcttggaccatacagtccatgtgtgctttgcgcctgcaatggacacagcgagacctgtgatcctgagacaggtgtttgtaactgcagagacaatacggctggcccgcactgtgagaagtgcagtgatgggtactatggagattcaactgcaggcacctcctccgattgccaaccctgtccgtgtcctggaggttcaagttgtgctgttgttcccaagacaaaggaggtggtgtgcaccaactgtcctactggcaccactggtaagagatgtgagctctgtgatgatggctactttggagaccccctgggtagaaacggccctgtgagactttgccgcctgtgccagtgcagtgacaacatcgatcccaacgcagttggaaattgcaatcgcttgacgggagaatgcctgaagtgcatctataacactgctggcttctattgtgaccggtgcaaagacggattttttggaaatcccctggctcccaatccagcagacaaatgcaaagcctgcaattgcaatccgtatgggaccatgaagcagcagagcagctgtaaccccgtgacggggcagtgtgaatgtttgcctcacgtgactggccaggactgtggtgcttgtgaccctggattctacaatctgcagagtgggcaaggctgtgagaggtgtgactgccatgccttgggctccaccaatgggcagtgtgacatccgcaccggccagtgtgagtgccagcccggcatcactggtcagcactgtgagcgctgtgaggtcaaccactttgggtttggacctgaaggctgcaaaccctgtgactgtcatcctgagggatctctttcacttcagtgcaaagatgatggtcgctgtgaatgcagagaaggctttgtgggaaatcgctgtgaccagtgtgaagaaaactatttctacaatcggtcttggcctggctgccaggaatgtccagcttgttaccggctggtaaaggataaggttgctgatcatagagtgaagctccaggaattagagagtctcatagcaaaccttggaactggggatgagatggtgacagatcaagccttcgaggatagactaaaggaagcagagagggaagttatggacctccttcgtgaggcccaggatgtcaaagatgttgaccagaatttgatggatcgcctacagagagtgaataacactctgtccagccaaattagccgtttacagaatatccggaataccattgaagagactggaaacttggctgaacaagcgcgtgcccatgtagagaacacagagcggttgattgaaatcgcatccagagaacttgagaaagcaaaagtcgctgctgccaatgtgtcagtcactcagccagaatctacaggggacccaaacaacatgactcttttggcagaagaggctcgaaagcttgctgaacgtcataaacaggaagctgatgacattgttcgagtggcaaagacagccaatgatacgtcaactgaggcatacaacctgcttctgaggacactggcaggagaaaatcaaacagcatttgagattgaagagcttaataggaagtatgaacaagcgaagaacatctcacaggatctggaaaaacaagctgcccgagtacatgaggaggccaaaagggccggtgacaaagctgtggagatctatgccagcgtggctcagctgagccctttggactctgagacactggagaatgaagcaaataacataaagatggaagctgagaatctggaacaactgattgaccagaaattaaaagattatgaggacctcagagaagatatgagagggaaggaacttgaagtcaagaaccttctggagaaaggcaagactgaacagcagaccgcagaccaactcctagcccgagctgatgctgccaaggccctcgctgaagaagctgcaaagaagggacgggataccttacaagaagctaatgacattctcaacaacctgaaagattttgataggcgcgtgaacgataacaagacggccgcagaggaggcactaaggaagattcctgccatcaaccagaccatcactgaagccaatgaaaagaccagagaagcccagcaggccctgggcagtgctgcggcggatgccacagaggccaagaacaaggcccatgaggcggagaggatcgcaagcgctgtccaaaagaatgccaccagcaccaaggcagaagctgaaagaacttttgcagaagttacagatctggataatgaggtgaacaatatgttgaagcaactgcaggaagcagaaaaagagctaaagagaaaacaagatgacgctgaccaggacatgatgatggcagggatggcttcacaggctgctcaagaagccgagatcaatgccagaaaagccaaaaactctgttactagcctcctcagcattattaatgacctcttggagcagctggggcagctggatacagtggacctgaataagctaaacgagattgaaggcaccctaaacaaagccaaagatgaaatgaaggtcagcgatcttgataggaaagtgtctgacctggagaatgaagccaagaagcaggaggctgccatcatggactataaccgagatatcgaggagatcatgaaggacattcgcaatctggaggacatcaggaagaccttaccatctggctgcttcaacaccccgtccattgaaaagccctagtgtctttagggctggaaggcagcatccctctgacaggggggcagttgtgaggccacagagtgccttgacacaaagattacatttttcagacccccactcctctgctgctgtccatcactgtccttttgaaccaggaaaagtcacagagtttaaagagaagcaaattaaacatcctgaatcgggaacaaagggttttatctaataaagtgtctcttccatcacgttgctaccttacccacacttccctctgatttgcgtgaggacgtggcatcctacttacgtacgtggcataacacatcgtgtgagcccatgtatgctggggtagagcaagtagccctcccctgtctcatcgatccagcagaacctcctcagtctcagtactcttgtttctataaggaaaagttttgctactaacagtagcattgtgatggccagtatatccagtccatggataaagaaaatgcatctgcatctcctgcccctcttccttctaagcaaaaggaaataaacatcctgtgccaaaggtattggtcatttagaatgtcggtagccatccatcagtgcttttagctattatgagtgtaggacactgagccatccgtgggtcaggatgcaattatttataaaagtccccaggtgaacatggctgaagatttttctagtatattaataattgactaggaagatgaactttttttcagatctttgggcagctgataatttaaatctggatgggcagcttgcactcaccaatagaccaaaagacatcttttgatattcttataaatggaacttacacagaagaaatagggatatgataaccactaaagttttgttttcaaaatcaaactaattcttacagcttttttattagttagtcttggaactagtgttaagtatctggcagagaacagttaatccctaaggtcttgacaaaacagaagaaaaacaagcctcctcgtcctagtcttttctagcaaagggataaaacttagatggcagcttgtactgtcagaatcccgtgtatccatttgttcttctgttggagagatgagacatttgacccttagctccagttttcttctgatgtttccatcttccagaatccctcaaaaaacattgtttgccaaatcctggtggcaaatacttgcactcagtatttcacacagctgccaacgctatcgagttcctgcactttgtgatttaaatccactctaaaccttccctctaagtgtagagggaagacccttacgtggagtttcctagtgggcttctcaacttttgatcctcagctctgtggttttaagaccacagtgtgacagttccctgccacacacccccttcctcctaccaacccacctttgagattcatatatagcctttaacactatgcaactttgtactttgcgtagcaggggctggggtggggggaaagaaacctattatcatggacacactggtgctattaattatttcaaatttatatttttgtgtgaatgttttgtgttttgtttatccatgctatagaacaaggaatttatgtagatatacttagtcctatttctagaatgacactctgttcactttgctcaatttttcctcttcactggcacaagtatctgaatacctccttccctcccttctagagttctttggattgtactccaaagaattgtgccttgtgtttgcagcatctccattctctaaattaatataattgctttcctccacacccagccacgtaaagaggtaacttgggtcctcttccattgcagtcctgatgatcctaacctgcagcacggtggttttacaatgttccagagcaggaacgccaggttgacaagctatggtaggattaggaaagtttgctgaagaggatctttgacgccacagtgggactagccaggaatgagggagaaatgccctttttggcaattgttggagctggataggtaagttttataagggagtacattttgactgagcacttagggcatcaggaacagtgctacttactggtgggtagactgggagaggtggtgtaacttagttcttgatgatcccacttcctgtttccatctgcttgggatataccagagtttaccacaagtgttttgacgatatactcctgagctttcactctgctggcttctcccaggcctcttctactatggcaggagatgtggtgtgctgttgcaaagttttcacgtcatcgtttcctggctagttcatttcattaagtggctacatcctaacatatgcattggtcaaggttgcagcaagaggactgaagattgactgccaagctagtttgggtgaagttcactccagcaagtctcaggccacaatggggtggtttggtttggtttccttttaactttctttttgttatttgcttttctcctccacctgtgtggtatattttttaagcagaattttattttttaaaataaaaggttctttacaagatgataccttaattacactcccgcaacacagccattattttattgtctagctccagttatctgtattttatgtaatgtaattgacaggatggctgctgcagaatgctggttgacacagggattattatactgctatttttccctgaattcttttccttggaattccaactgtggaccttttatatgtgccttcactttagctgtttgccttactctacagccttgctctccggggtggttaataaaatgcaacacttggcatttttatgttataagaaaaacagtattttatttataataaaatctgaatattttgtaacccttta

SEQ ID NO: 293 - DNA, 781 bp, Homo sapiens
acacagagagaaaggctaaagttctctggaggatgtggctgcagagcctgctgctcttgggcactgtggcctgcagcatctctgcacccgcccgctcgcccagccccagcacgcagccctgggagcatgtgaatgccatccaggaggcccggcgtctcctgaacctgagtagagacactgctgctgagatgaatgaaacagtagaagtcatctcagaaatgtttgacctccaggagccgacctgcctacagacccgcctggagctgtacaagcagggcctgcggggcagcctcaccaagctcaagggccccttgaccatgatggccagccactacaagcagcactgccctccaaccccggaaacttcctgtgcaacccagattatcacctttgaaagtttcaaagagaacctgaaggactttctgcttgtcatcccctttgactgctgggagccagtccaggagtgagaccggccagatgaggctggccaagccggggagctgctctctcatgaaacaagagctagaaactcaggatggtcatcttggagggaccaaggggtgggccacagccatggtgggagtggcctggacctgccctgggccacactgaccctgatacaggcatggcagaagaatgggaatattttatactgacagaaatcagtaatatttatatatttatatttttaaaatatttatttatttatttatttaagttcatattccatatttattcaagatgttttaccgtaataattattattaaaaatatgcttcta

SEQ ID NO: 294 - DNA, 3376 bp, Homo sapiens; identical to SEQ ID NO: 53

SEQ ID NO: 295 - DNA, 8133 bp, Homo sapiens
cgtccctgcagccctcgcccggcgctccagtagcaggacccggtctcgggaccagccggtaatatgcacgtgtcactagctgaggccctggaggttcggggtggaccacttcaggaggaagaaatatgggctgtattaaatcaaagtgctgaaagtctccaagaattattcagaaaagtaagcctagctgatcctgctgcccttggcttcatcatttctccatggtctctgctgttgctgccatctggtagtgtgtcatttacagatgaaaatatttccaatcaggatcttcgagcattcactgcaccagaggttcttcaaaatcagtcactaacttctctctcagatgttgaaaagatccacatttattctcttggaatgacactgtattggggggctgattatgaagtgcctcagagccaacctattaagcttggagatcatctcaacagcatactgcttggaatgtgtgaggatgttatttacgctcgagtttctgttcggactgtgctggatgcttgcagtgcccacattaggaatagcaattgtgcaccctcattttcctacgtgaaacacttggtaaaactggttctgggaaatctttctgggacagatcagctttcctgtaacagtgaacaaaagcctgatcgaagccaggctattcgagatcgattgcgaggaaaaggattaccaacaggaagaagctctacttctgatgtactagacatacaaaagcctccactctctcatcagacctttcttaacaaagggcttagtaaatctatgggatttctgtccatcaaagatacacaagatgagaattatttcaaggacattttatcagataattctggacgtgaagattctgaaaatacattctccccttaccagttcaaaactagtggcccagaaaaaaaacccatccctggcattgatgtgctttctaagaagaagatctgggcttcatccatggacttgctttgtacagctgacagagacttctcttcaggagagactgccacatatcgtcgttgtcaccctgaggcagtaacagtgcggacttcaactactcctagaaaaaaggaggcaagatactcagatggaagtatagccttggatatctttggccctcagaaaatggatccaatatatcacactcgagaattgcccacctcctcagcaatatcaagtgctttggaccgaatccgagagagacaaaagaaacttcaggttctgagggaagccatgaatgtagaagaaccagttcgaagatacaaaacttatcatggtgatgtctttagtacctccagtgaaagtccatctattatttcctctgaatcagatttcagacaagtgagaagaagtgaagcctcaaagaggtttgaatccagcagtggtctcccaggggtagatgaaaccttaagtcaaggccagtcacagagaccgagcagacaatatgaaacaccctttgaaggcaacttaattaatcaagagatcatgctaaaacggcaagaggaagaactgatgcagctacaagccaaaatggcccttagacagtctcggttgagcctatatccaggagacacaatcaaagcgtccatgcttgacatcaccagggatccgttaagagaaattgccctagaaacagccatgactcaaagaaaactgaggaatttctttggccctgagtttgtgaaaatgacaattgaaccatttatatctttggatttgccacggtctattcttactaagaaagggaagaatgaggataaccgaaggaaagtaaacataatgcttctgaacgggcaaagactggaactgacctgtgataccaaaactatatgtaaagatgtgtttgatatggttgtggcacatattggcttagtagagcatcatttgtttgctttagctaccctcaaagataatgaatatttctttgttgatcctgacttaaaattaaccaaagtggccccagagggatggaaagaagaaccaaagaaaaagaccaaagccactgttaattttactttgtttttcagaattaaattttttatggatgatgttagtctaatacaacatactctgacgtgtcatcagtattaccttcagcttcgaaaagatattttggaggaaaggatgcactgtgatgatgagacttccttattgctggcatccttggctctccaggctgagtatggagattatcaaccagaggttcatggtgtgtcttactttagaatggagcactatttgcccgccagagtgatggagaaacttgatttatcctatatcaaagaagagttacccaaattgcataatacctatgtgggagcttctgaaaaagagacagagttagaatttttaaaggtctgccaaagactgacagaatatggagttcattttcaccgagtgcaccctgagaagaagtcacaaacaggaatattgcttggagtctgttctaaaggtgtccttgtgtttgaagttcacaatggagtgcgcacattggtccttcgctttccatggagggaaaccaagaaaatatctttttctaaaaagaaaatcacattgcaaaatacatcagatggaataaaacatggcttccagacagacaacagtaagatatgccagtacctgctgcacctctgctcttaccagcataagttccagctacagatgagagcaagacagagcaaccaagatgcccaagatattgagagagcttcgtttaggagcctgaatctccaagcagagtctgttagaggatttaatatgggacgagcaatcagcactggcagtctggccagcagcaccctcaacaaacttgctgttcgacctttatcagttcaagctgagattctgaagaggctatcctgctcagagctgtcgctttaccagccattgcaaaacagttcaaaagagaagaatgacaaagcttcatgggaggaaaagcctagagagatgagtaaatcataccatgatctcagtcaggcctctctctatccacatcggaaaaatgtcattgttaacatggaacccccaccacaaaccgttgcagagttggtgggaaaaccttctcaccagatgtcaagatctgatgcagaatctttggcaggagtgacaaaacttaataattcaaagtctgttgcgagtttaaatagaagtcctgaaaggaggaaacatgaatcagactcctcatccattgaagaccctgggcaagcatatgttctaggaatgactatgcatagttctggaaactcttcatcccaagtacccttaaaagaaaatgatgtgctacacaaaagatggagcatagtatcttcaccagaaagggagatcaccttagtgaacctgaaaaaagatgcaaagtatggcttgggatttcaaattattggtggggagaagatgggaagactggacctaggcatatttatcagttcagttgcccctggaggaccagctgacttggatggatgcttgaagccaggagaccgtttgatatctgtgaatagtgtgagtctggagggagtcagccaccatgctgcaattgaaattttgcaaaatgcacctgaagatgtgacacttgttatctctcagccaaaagaaaagatatccaaagtgccttctactcctgtgcatctcaccaatgagatgaaaaactacatgaagaaatcttcctacatgcaagacagtgctatagattcttcttccaaggatcaccactggtcacgtggtaccctgaggcacatctcggagaactcctttgggccgtctgggggcctgcgggaaggaagcctgagttctcaagattccaggactgagagtgccagcttgtctcaaagccaggtcaatggtttctttgccagccatttaggtgaccaaacctggcaggaatcacagcatggcagcccttccccatctgtaatatccaaagccaccgagaaagagactttcactgatagtaaccaaagcaaaactaaaaagccaggcatttctgatgtaactgattactcagaccgtggagattcagacatggatgaagccacttactccagcagtcaggatcatcaaacaccaaaacaggaatcttcctcttcagtgaatacatccaacaagatgaattttaaaactttttcttcatcacctcctaagcctggagatatctttgaggttgaactggctaaaaatgataacagcttggggataagtgtcacggtactgtttgacaagggaggtgtgaatacgagtgtcagacatggtggcatttatgtgaaagctgttattccccagggagcagcagagtctgatggtagaattcacaaaggtgatcgcgtcctagctgtcaatggagttagtctagaaggagccacccataagcaagctgtggaaacactgagaaatacaggacaggtggttcatctgttattagaaaagggacaatctccaacatctaaagaacatgtcccggtaaccccacagtgtaccctttcagatcagaatgcccaaggtcaaggcccagaaaaagtgaagaaaacaactcaggtcaaagactacagctttgtcactgaagaaaatacatttgaggtaaaattatttaaaaatagctcaggtctaggattcagtttttctcgagaagataatcttataccggagcaaattaatgccagcatagtaagggttaaaaagctctttcctggacagccagcagcagaaagtggaaaaattgatgtaggagatgttatcttgaaagtgaatggagcctctttgaaaggactatctcagcaggaagtcatatctgctctcaggggaactgctccagaagtattcttgcttctctgcagacctccacctggtgtgctaccggaaattgatactgcgcttttgaccccacttcagtctccagcacaagtacttccaaacagcagtaaagactcttctcagccatcatgtgtggagcaaagcaccagctcagatgaaaatgaaatgtcagacaaaagcaaaaaacagtgcaagtccccatccagaagagacagttacagtgacagcagtgggagtggagaagatgacttagtgacagctccagcaaacatatcaaattcgacctggagttcagctttgcatcagactctaagcaacatggtatcacaggcacagagtcatcatgaagcacccaagagtcaagaagataccatttgtaccatgttttactatcctcagaaaattcccaataaaccagagtttgaggacagtaatccttcccctctaccaccggatatggctcctgggcagagttatcaaccccaatcagaatctgcttcctctagttcgatggataagtatcatatacatcacatttctgaaccaactagacaagaaaactggacacctttgaaaaatgacttggaaaatcaccttgaagactttgaactggaagtagaactcctcattaccctaattaaatcagaaaaaggaagcctgggttttacagtaaccaaaggcaatcagagaattggttgttatgttcatgatgtcatacaggatccagccaaaagtgatggaaggctaaaacctggggaccggctcataaaggttaatgatacagatgttactaatatgactcatacagatgcagttaatctgctccgggctgcatccaaaacagtcagattagttattggacgagttctagaattacccagaataccaatgttgcctcatttgctaccggacataacactaacgtgcaacaaagaggagttgggtttttccttatgtggaggtcatgacagcctttatcaagtggtatatattagtgatattaatccaaggtccgtcgcagccattgagggtaatctccagctattagatgtcatccattatgtgaacggagtcagcacacaaggaatgaccttggaggaagttaacagagcattagacatgtcacttccttcattggtattgaaagcaacaagaaatgatcttccagtggtccccagctcaaagaggtctgctgtttcagctccaaagtcaaccaaaggcaatggttcctacagtgtggggtcttgcagccagcctgccctcactcctaatgattcattctccacggttgctggggaagaaataaatgaaatatcgtaccccaaaggaaaatgttctacttatcagataaagggatcaccaaacttgactctgcccaaagaatcttatatacaagaagatgacatttatgatgattcccaagaagctgaagttatccagtctctgctggatgttgtggatgaggaagcccagaatcttttaaacgaaaataatgcagcaggatactcctgtggtccaggtacattaaagatgaatgggaagttatcagaagagagaacagaagatacagactgcgatggttcacctttacctgagtattttactgaggccaccaaaatgaatggctgtgaagaatattgtgaagaaaaagtaaaaagtgaaagcttaattcagaagccacaagaaaagaagactgatgatgatgaaataacatggggaaatgatgagttgccaatagagagaacaaaccatgaagattctgataaagatcattcctttctgacaaacgatgagctcgctgtactccctgtcgtcaaagtgcttccctctggtaaatacacgggtgccaacttaaaatcagtcattcgagtcctgcggggtttgctagatcaaggaattccttctaaggagctggagaatcttcaagaattaaaacctttggatcagtgtctaattgggcaaactaaggaaaacagaaggaagaacagatataaaaatatacttccctatgatgctacaagagtgcctcttggagatgaaggtggctatatcaatgccagcttcattaagataccagttgggaaagaagagttcgtttacattgcctgccaaggaccactgcctacaactgttggagacttctggcagatgatttgggagcaaaaatccacagtgatagccatgatgactcaagaagtagaaggagaaaaaatcaaatgccagcgctattggcccaacatcctaggcaaaacaacaatggtcagcaacagacttcgactggctcttgtgagaatgcagcagctgaagggctttgtggtgagggcaatgacccttgaagatattcagaccagagaggtgcgccatatttctcatctgaatttcactgcctggccagaccatgatacaccttctcaaccagatgatctgcttacttttatctcctacatgagacacatccacagatcaggcccaatcattacgcactgcagtgctggcattggacgttcagggaccctgatttgcatagatgtggttctgggattaatcagtcaggatcttgattttgacatctctgatttggtgcgctgcatgagactacaaagacacggaatggttcagacagaggatcaatatattttctgctatcaagtcatcctttatgtcctgacacgtcttcaagcagaagaagagcaaaaacagcagcctcagcttctgaagtgacatgaaaagagcctctggatgcatttccatttctctccttaacctccagcagactcctgctctctatccaaaataagatcacagagcagcaagttcatacaacatgcatgttctcctctatcttagaggggtattcttcttgaaaataaaaaatattgaaatgctgtatttttacagctactttaacctatgataattatttacaaaattttaacactaaccaaacaatgcagatcttagggatgattaaaggcagcatttgatgatagcagacattgttacaaggacatggtgagtctatttttaatgcaccaatcttgtttatagcaaaaatgttttccaatattttaataaagtagttattttataggggatacttgaaaccagtatttaagctttaaatgacagtaatattggcatagaaaaaagtagcaaatgtttactgtatcaatttctaatgtttactatatagaatttcctgtaatatatttatatactttttcatgaaaatggagttatcagttatctgtttgttactgcatcatctgtttgtaatcattatctcactttgtaaataaaaacacaccttaaaacatg

SEQ ID NO: 296 - DNA, 1165 bp, Homo sapiens
cgcaccatctgcacccccacattctcctcgcgggaagcgcagcagtgcctccaagggttcttaaagcagagatgaataatacggcagctagtccaatgtctactgcaacttcaagtagtggaaggagtacagggaagtctataagctttgcaacagaattacagagtatgatgtattctttaggtgatgctagaaggcctcttcatgaaacagcagttttggtagaagatgtggtacacactcagttaattaatctgttacagcaagctgctgaagtttctcagctgcggggagcaagggtaatcactcctgaagatcttctgtttttgatgcgcaaagataagaaaaaacttagaagactgctaaaatacatgtttatccgagactacaaatcaaagattgtcaaaggcatcgatgaggatgatcttctcgaagacaaattgagtggcagcaataatgcgaacaaaagacaaaagattgctcaggacttcctcaactctattgaccagacaggagaacttttagcaatgtttgaagatgacgaaattgatgaagttaaacaagaaagaatggagagagcagaaagacaaactcgaattatggattcagctcaatatgcagaattctgtgaaagtcgacaattaagtttctccaaaaaagcttccaaatttcgagactggttggactgcagcagtatggagataaaacccaatgttgtcgcaatggaaatcttagcatatttagcgtatgaaactgtggcacagttagtggatctggctcttcttgtgaggcaagacatggtaaccaaggcaggggaccccttcagccatgccatttctgcaaccttcattcagtatcacaactctgctgagagcactgcagcctgtggtgttgaggctcacagcgatgccatccagccctgccacatcagagaggccattcgacgctacagccacaggattggcccactttccccattcacaaatgcctaccgcaggaatgggatggcttttctagcctgctgatgtgacaactgtgatgtgcctgcaacaacaggaaaggcaatgttatattaaggtgatttcttgtgaacaaaataaaatacaaatttacctttcttttatctgacaaaaaaaaaaaaaaaaaaaaaaaaaaaaaaaaaaaa

SEQ ID NO: 297 - DNA, 3003 bp, Homo sapiens
ccaaccccggcctaggctctccaccgcatcggattctggaatttacgatcacgaaagttctattgtcccgcgattggctcccgggccgcatgacatcatagcgcttgattcatccttcgggtcccgattggctggccgcgccattgtgacgtcacggtcagcccacgttctgattgtagatagccggcgccttcctcttcccatcgcgcgggtcctagccaccggtgtctccttctacatccgcctctgcgccggctgccacccgcgctccctccgccgccgccgccttgctgctgctcaaagctgctgccgccccttgggctaaaaggttttcaaatggaacattttgatgcatcacttagtacctatttcaaggcattgctaggccctcgagatactagagtaaaaggatggtttcttctggacaattatatacccacatttatctgctctgtcatatatttactaattgtatggctgggaccaaaatacatgaggaataaacagccattctcttgccgggggattttagtggtgtataaccttggactcacactgctgtctctgtatatgttctgtgagttagtaacaggagtatgggaaggcaaatacaacttcttctgtcagggcacacgcaccgcaggagaatcagatatgaagattatccgtgtcctctggtggtactacttctccaaactcatagaatttatggacactttcttcttcatcctgcgcaagaacaaccaccagatcacggtcctgcacgtctaccaccatgcctcgatgctgaacatctggtggtttgtgatgaactgggtcccctgcggccactcttattttggtgccacacttaatagcttcatccacgtcctcatgtactcttactatggtttgtcgtcagtcccttccatgcgtccatacctctggtggaagaagtacatcactcaggggcagctgcttcagtttgtgctgacaatcatccagaccagctgcggggtcatctggccgtgcacattccctcttggttggttgtatttccagattggatacatgatttccctgattgctctcttcacaaacttctacattcagacctacaacaagaaaggggcctcccgaaggaaagaccacctgaaggaccaccagaatgggtccatggctgctgtgaatggacacaccaacagcttttcacccctggaaaacaatgtgaagccaaggaagctgcggaaggattgaagtcaaagaattgaaaccctccaaaccacgtcatctgattgtaagcacaatatgagttgtgccccaatgctcgttaacagctgctgtaactagtctggcctacaatagtgtgattcatgtaggacttctttcatcaattcaaaacccctagaaaacgtatacagattatataagtagggataagatttctaacatttctgggctctctgacccctgcgctagactgtggaaagggagtattattatagtatacaacactgctgttgccttattagttataacatgataggtgctgaattgtgattcacaatttaaaaacactgtaatccaaacttttttttttaactgtagatcatgcatgtgattgtaaatgtaaatttgtacaatgttgttatggtagagaaacacacatgccttaaaatttaaaaagcagggcccaaagcttattagtttaaattagggtatgtttcaagtttgtattaatttgtaatagctctgtttagaaaaaatcaaagaccatgatttatgaaactaatgtgacataatttccagtgacttgttgatgtgaaatcagacacggcaccttcagttttgtactattggctttgaatcaagcaggctcaaatctagtggaacagtcagtttaactttttaacagatcttatttttttattttgagtgccactattaatgtaaaaaggggggggctctacagcagtcgtgatgaaacttaaatatatattctttgtcctcgagattttaggaagggtgtagggtgagtaggccatttttaatttctgaagtgctaagtgtttttatacagcaaacaaaaagtcaattttgctttccaccagtgcgagagaggatgtatacttttcaagagagatgattgcctatttaccgtttgacagagtcccgtagatgagcaatggggaactggttgccagggtctaaatttggattgatttatgcactgttatctgttttgacacagatttccttgtaaaatgtgcctagtttaccaaaattaacaaagggggggaaaggaccttagaactttttaaggtaaaatcaaatatagctacagcataagagaatcgagaaatttgatagaggtaacttgtttaatgtaaatctaatagtacttgtaatttctttctgcttagaatctaaagatgtgtttagaacctcttgtttaaaaataatagactgcttatcataaaatcacatctcacacatttgaggcagtggtcaaacaggtaaagcctatgatgtgtgtcattttaaagtgtcggaatttagcctctgaataccttctccattgggggaaagatattcttggaaccactcatgacatatcttagaaggtcattgacaatgtataaactaattgttggtttgatatttatgtaaatatcagtttaccatgctttaattttgcacattcgtactatagggagcctattggttctctattagtcttgtgggttttctgtttgaaaaggagtcatggcatctgtttacatttaccttatcaaacctagaatgtgtatatttataaatgtatgtcttcattgctaggtactaatttgcagatgtctttacatatttcaatacagaaactataacattcaatagtgtgctgtcaaagtgtgcttagctcacctggatatacctacattgttaaatgtctaaacagtaatcattaaaacatttttgattacctgtgaaaaaaaaaaaaaaaaaaaaaaaaaaaaaaaaaaaaaa

SEQ ID NO: 298 - DNA, 2715 bp, Homo sapiens
gcttcgcagcgtcacgccctccggggccgtggcggcgacggcggtgcgtagcttactcacaggggcggcccgtatccctccgccgccggcgcggctcggccctccctcccctggcccgccaatccccgcgcctcccgacctgcccctcggtcgggcccaccccgtgctccgacggccccaccccggcggcgcagcccgcccgcccgcgcgtccctcggtccacctgcagcagggaggaagacaggcaatccctccggctgtccgaccaagagaggccggccgagcccgaggcttgggcttttgctttctggcggagggatctgcggcggtttaggaggcggcgctgatcctgggaggaagaggcagctacggcggcggcggcggtggcggctagggcggcggcgaataaaggggccgccgccgggtgatgcggtgaccgctgcggcaggcccaggagctgagtgggccccggccctcagcccgtcccgccggacccgctttcctcaactctccatcttctcctgccgaccgagatcgccgaggcggcctcaggctccctagccccttccccgtcccttccccgcccccgtccccgccccgggggccgccgccacccgcctcccaccatggctctgaagagaatccacaaggaattgaatgatctggcacgggaccctccagcacagtgttcagcaggtcctgttggagatgatatgttccattggcaagctacaataatggggccaaatgacagtccctatcagggtggagtatttttcttgacaattcatttcccaacagattaccccttcaaaccacctaaggttgcatttacaacaagaatttatcatccaaatattaacagtaatggcagcatttgtcttgatattctacgatcacagtggtctccagcactaactatttcaaaagtactcttgtccatctgttctctgttgtgtgatcccaatccagatgatcctttagtgcctgagattgctcggatctacaaaacagatagagaaaagtacaacagaatagctcgggaatggactcagaagtatgcgatgtaattaaagaaattattggataacctctacaaataaagataggggaactctgaaagagaaagtccttttgatttccatttgactgctttctatgagcccacgcctcatcttcccctgtgcacatgtttacctgatacagcagtgctgcgtgttgtacatacttggaacaacaaactagaaatactgtacttctgtaccaacattgcctcctagcagagaagtgtgtgtgtgacaagccagttctacaggcattacctaggtgtgagactaaaagcttttcttattgacttaaatttggataacagcaaggtgtgaggggggtggtgggtatggtgtgtgcttggatgggaaagaaaaggctccactcacctataggagattatttttaagtggaatccatttaaactcaaaacagttatgaaaagcaaggtgaagaacatgaagctgtgtctgtattcattttattccgaaggagctacgtcttaggtgaaagttatgaccaaccagattaaactctacccacatcctgcattttaaggtctaagtttaactggtcaacatttaaatggattggagctattagtacatcaagtgtgatgggctttgttcccaactcttttacatctccctaccccttcaacctttggcctttcagcccttctttctctcttccatattctttggtttgtatgtggtttctcagttaatacatagctaatagctcttatttttcttatgtttttaaccgcttaggtctatttggatgtaagggtgaaaattcatttgatggaaatacttgtgtatatttaaagacccaattgctcctctggagcttgtactttcaagaatgattaatctgtgtaataaactggttactacagtcattacatataattttgtgtgaataggctttttcatttttaagaagtttgtctagctgagattagtggtggattttctcccacttctgaaatgttcatttatactggttgcattttaagatcatgaaacaattccagttacattgtaaaaaggatatcttacgagtaattttattgaacaagttagaggcataagcttaagagcatttccatgaaacaacacatgcagcattccaggaacttgattgttaaattcaataagaaatttgctttattaatgaaactaagctgcatttcatcaaaaccttgtgacattcccttggtacataggacataaaacacagaggcattgctatttggtaagttaagcttctgtgattgtaattataaaagagcaacattgaccaaacctgggaaacaagagcacagtcttgtttggagagtctacataattactttgcactaacatttgcaggatgttcacacaattttaaattgtactgtatgtggctttttgaagtcttcccttgaccctagtaaaatatagcttgaaacttgtaaacaactgtgtttgccagaaacatcattcatgtgaactaggcaagttaccttttttccccccttcttttcctaattgtaaactaggccaacctgaaagccatggctgatgctctagccatcaggttctttcaaatgcatctttacactcttgcacaaaagttaaggaataaatgtccactgcttttggttttaaaaaaaaaaaaaaa

SEQ ID NO: 299 - DNA, 3220 bp, Homo sapiens
tcactggagaggaggcagggacagacccagcagcacccacctgagcgagaagagcagacaccgtgctcctggaatcacccagcatgttgcaaggtctcctgccagtcagtctcctcctctctgttgcagtaagtgctataaaagaactccctggggtgaagaagtatgaagtggtttatcctataagacttcatccactgcataaaagagaggccaaagagccagagcaacaggaacaatttgaaactgaattaaagtataaaatgacaattaatggaaaaattgcagtgctttatttgaaaaaaaacaagaacctccttgcaccaggctacacggaaacatattataattccactggaaaggagatcaccacaagcccacaaattatggatgattgttattatcaaggacatattcttaatgaaaaggtttctgacgctagcatcagcacatgtaggggtctaaggggctacttcagtcagggggatcaaagatactttattgaacctttaagccccatacatcgggatggacaggagcatgcactcttcaagtataaccctgatgaaaagaattatgacagcacctgtgggatggatggtgtgttgtgggcccacgatttgcagcagaacattgccctacctgccaccaaactagtaaaattgaaagacaggaaggttcaggaacatgagaaatacatagaatattatttggtcctggataatggtgagtttaaaaggtacaatgagaatcaagatgagatcagaaagagggtatttgagatggctaattatgtcaacatgctttataaaaagctcaatactcatgtggccttagttggtatggaaatctggactgacaaggataagataaagataaccccaaatgcaagcttcaccttggagaatttttctaaatggagggggagtgttctctcaagaagaaagcgtcatgatattgctcagttaatcacagcaacagaacttgctggaacgactgtgggtcttgcatttatgtctacaatgtgttctccttattctgttggcgttgttcaggaccacagcgataatcttcttagagttgcagggacaatggcacatgaaatgggccacaactttggaatgtttcatgacgactattcttgcaagtgtccttctacaatatgtgtgatggacaaagcactgagcttctatatacccacagacttcagttcctgcagccgtctcagctatgacaagttttttgaagataaattatcaaattgcctctttaatgctccattgcctacagatatcatatccactccaatttgtgggaaccagttggtggaaatgggagaggactgtgattgtgggacatctgaggaatgtaccaatatttgctgtgatgctaagacatgtaaaatcaaagcaacttttcaatgtgcattaggagaatgttgtgaaaaatgccaatttaaaaaggctgggatggtgtgcagaccagcaaaagatgagtgcgacctgcctgaaatgtgtaatggtaaatctggtaattgtcctgatgatagattccaagtcaatggcttcccttgccatcacgggaagggccactgcttgatggggacatgccccacactgcaggagcagtgcacagagctgtggggaccaggaactgaggttgcagataagtcatgttacaacaggaatgaaggtgggtcaaagtacgggtactgtcgcagagtggatgacacactcattccctgcaaagcaaatgataccatgtgtgggaagttgttctgtcaaggtgggtcggataatttgccctggaaaggacggatagtgactttcctgacatgtaaaacatttgatcctgaagacacaagtcaagaaataggcatggtggccaatggaactaagtgtggcgataacaaggtttgcattaatgcagaatgtgtggatattgagaaagcctacaaatcaaccaattgctcatctaagtgcaaaggacatgctgtgtgtgaccatgagctccagtgtcaatgtgaggaaggatggatccctcccgactgcgatgactcctcagtggtcttccacttctccattgtggttggggtgctgttcccaatggcggtcatttttgtggtggttgctatggtaatccggcaccagagctccagagaaaagcagaagaaagatcagaggccactatctaccactggcaccaggccacacaaacagaagaggaaaccccagatggtaaaggctgttcaaccccaagagatgagtcagatgaagccccatgtgtatgatctgccagtagaaggcaatgagcccccagcctcttttcataaagacacaaacgcacttccccctactgttttcaaggataatccagtgtctacacctaaggactcaaatccaaaagcatgaagcaacagctaagcaagaactaatggctaaattatcaacttggaaaactggaaaatctggatggcagagaaatatactatctatctcaccagtatttgctctcgactcaagaaggttaacattttctgattcatgttagactttgaagagactaaagaaaattttcaagaggaacatatgcctgagaacctttgcatgaatttaaaatttcaattatccattcttataagaaggaagatgattgtaaagaaatatctccgaagttaaaatctgtaataggaattgattcattctctaatgaaaacaaaacataaaaacatcacactaatcttggaggaataagaaaaattgtacatccattaaatgtacaattgattgcaacatcttgattgttttaaccattaacttgtcaaattacaatcacagttaagaaaatgatgtaaaattctgttttgtggatctctttcctagattagcttctgaaatcattattagctatatcatttgaggttttctacaatttggtataactaagaatttaaaaatgttttatcatatatatttgtataattaattactggcatggttaaagtggttttcactttttaaatggagaaaatttcagttaaattaataggataaaccaggttgcgaactggtgacctgtaggccatgtttgcactgcaaatatatttggtctgaatgatattgatattggacacatagtacttttacatgttttgaatgtattgctaatatttaaaaattgagagatcttgcataaacaatagattcccagctttgtcaga

SEQ ID NO: 300 - DNA, 2809 bp, Homo sapiens
gagaggcgcacccgggcggccagctgggctcggagcggaacggggtcaggatggacgaggacgtgctaaccaccctgaagatcctcatcatcggcgagagtggggtgggcaagtccagcctgctcttgaggttcacagatgatacgtttgatccagaacttgcagcaacaataggtgttgactttaaggtgaaaacaatttcagtggatggaaataaggctaaacttgcaatatgggatactgctggtcaagagaggtttagaacattaactcccagctattatagaggtgcacagggtgttatattagtttatgatgtcacaagaagagatacatttgttaaactggataattggttaaatgaattggaaacatactgtacaagaaatgacatagtaaacatgctagttggaaataaaatcgataaggaaaatcgtgaagtcgatagaaatgaaggcctgaaatttgcacgaaagcattccatgttatttatagaggcaagtgcaaaaacctgtgatggtgtacaatgtgcctttgaagaacttgttgaaaagatcattcagacccctggactgtgggaaagtgagaaccagaataaaggagtcaaactgtcacacagggaagaaggccaaggaggaggagcctgtggtggttattgctctgtgttataaactctgggaaattccatctcttgcatatttgatcagatagtgacatctttctgtatataaactctttaactgctattttagggaccttgcagtttgcacataattgttttatatcatagcagtaaatatttgcaagaaatcccactcatcgaccccgggtaaaatgttatggtaagcatgcacagtttgcagtctacagtttttttatgtagcacaaaataggtgtacctttataagtacattcaattttatgatttacatttatcatgtaatttttaaaaaaatccatctatctaggatatgttgatacaaagtctgcttttgctattctttttgcttaaatactcctatcattttctgaattacttggtatttagaactcctagcaccacggggaagaatagaggtatcatcaaacgtggcaaattttctttcaggaataataaagagcatgattccacagcttttctgggatgtttgagattcttttttagtactaagcaaaattctcatcacagaatgtagcccaggccaatttataactaaatctctatttgttcggatgatgcttctaaaacagcattgataggttaaagaagcttggtatttttaatttacttcaatgattagctcagttgcttaactggagttttaatcctgtgatatgtacattggattcatgactgtgcagcatttttagttatgtggtgtttggcagaatgacaataaggttttcccccattttggtttcaggaggacatgaatagtgtgtttattgtaactcctcatacacttttaaaaccaacatcttttttcataaatgttggtagtgtttgtccaggtaccttaactgtagcttgtgtaatgttgatgaatatctgtatcttacggcttccataatggctagttgatattcaaaaacctatttctgtgttttgaggggtggggaaaaaaaacactaagtgataatttgaaaaaggcatattgcttccagattctgatgtgtgagggaaaatactgtcacaatgaaaatcttgacaatttacttaacaagtaaccagtagttcatcaaaaccaacttgtacagactaataaatctttttcacagtattcagttttctcacctcttgctattgtatattgtagatttttttcattcatgtgttatttaatttacactgatctctgctattttaaccccccaaataagttatttgtcctttaaggttggttactataatacccctcagtaagattccagtattaatttctgggcagtttgttctctgtatacaattgcaaatgataagcatttttgtgagtgaccacctttgcaatatgtttgttaatttacttcatgttgggttctttctgaaatgtacatctttacatataaaaacctcacattctacttgatttacacttcctagtctacattacatgtggttgaaggttttatacattctatatgcttttactaaatatacaagatttactactagaaatttggagaaagaacactaacacatgtacttgtgatttgttcatgttatattaaaacttgagatttgtgtatttatgtagagtctgtattgacaagactgttgttttttgctccttgagctatataataatctgtgtattggattgttgtcttgatttggtctaaatttgaatatatatgagttacttgaatataacaaaaatgaattttgtttgatagatttatattgtaacctttttctagttcttgaataaatatagcctgctttccctagatgcatttgtgtaggaagtatatacatttccctattactctcatcagctgaagaatatgtactattgtgttactcaaattatgtggctttcattttgttgttttgttgcaagcttagtgttttgtagtggaggttttgtaaatgaaacagttgtaatatctaaggtcaggcacctagtaacagggttttgttaattcttttcagaatcattgaagcagtcttaaagggtcttttgcagatggtacaaattagaacaattagaatatagtattttgagttctagtagtactgagattgacccaaacaaataaaaaactattcaatttctgagtaatagttaaaaaaaaaaaaaaaaaaaaa

SEQ ID NO: 301 - DNA, 2040 bp, Homo sapiens
ccatggctcagcctctgggtccagagcctcagctcctacctcttccctccttgccagcccctgatgcctgccagacttttgcctctgctggagcccctgcctgaccagcttcccctccctgtctggttgggatttgggggctgagctgtctggggtcccagggccaaccaatgcagtgccggctcccgcggggcctggctggagccctcctcaccctcctgtgcatggggctcctgtgtctgcggtaccacttgaacctgtccccgcagcgggtacaagggacccccgagctgagccagccgaacccggggccccctaagctacagctacacgatgtcttcattgcagtgaagacgacccgggctttccaccgcttgcgcctggagctgctgcttgacacgtgggtttccaggaccagggaacagacatttgtcttcaccgacagcccagacaaaggcctccaggagagactggggtcccaccttgtggtcaccaactgctccgcggaacacagccacccagctctgtcctgcaagatggctgctgagttcgacaccttcttggccagtgggcttaggtggttctgccatgtggacgatgacaactatgtgaacccaagggcgctgctgcagcttctgagagccttcccgctggcccgcgacgtctatgtgggaaggcccagcctgaaccggcccatccatgcctcagagccacagccccacaaccgcacgaggctggtacagttctggtttgccactgggggtgctggcttctgcatcaatcgcaaactggctttgaagatggctccgtgggccagtggctcccgtttcatggacacatctgctctcatccggctgcctgatgactgcaccatgggctatatcattgagtgcaagctgggcggccgcctgcagcccagccccctctttcactcccacctggagaccctgcagctgctgaggactgcacagctcccagaacaggtcaccctcagctacggtgtctttgaggggaaactcaacgtcattaagctacagggccccttctccccggaggaggacccctccagatttcgctccctccattgtctgctctatccagatacaccctggtgtccccagctgggtgcccgatgaatcctgaactgctgggcaaaggttgggcagagacttctgggtgtgccttggctcccaaggtggcactgtgggtccctggcaagtgtcttgtgataggcagtccctggcagggccttcgggtggttggcaagcccaggatctgagtggcaattggcactgaaggcaccccaggcccctgggaggtgagttagacagcccaggggaccaggtggaccaggtggtggccagagaggctccaggggctagactccctcaggaggctgaattgaaaaagggcagggggcacttgagctgggctggggctcaggggtcctaaccctttaggcagtgacatggcctctgggtggggtctggccgttggccctggctaatgtctctcagtcattcccctggggctcaagcgctgggccgcccactcctgcctccctcatctgtgtcccgagttcctgaagggacatgggtggaatgatggcagaatccagggtctgcagcacctgctgttgttgccaaccagtctcccaaagctccttgctccccaccccttgcgaacaggaccagattttgtttggagcctcagcatgccggggcccagatgatggagcataacgggtcccagccaattgtgatgatcctttttgctcatttcccagcctttcttgctgttaggggctaccatgggaccagctctggccagagggaactaagcaaatccaatagagatgtttctggggaaggttttgcagcccactccccatcttcctgctataaatgtgggtgtgatggctggatctggggcagccaccttgctaccatgaaggaaaggccaagacaatcatccacagctattccctccagcatctggttctgtacaaaaattaaatgcttatttgtttaagtcaaaaaa

SEQ ID NO: 302 - DNA, 5898 bp, Homo sapiens
gctgctgctgcagtgggacaggtggcggcgaccggcggcgtccgaggagatttaatccagagactgacttcactatagaacccacagttgtatcaatggttggggaaagatagtggcaacaggcaaaggagaaacagctctgacatacaaagaaaatgagtatgctaaagccaagtgggcttaaggcccccaccaagatcctgaagcctggaagcacagctctgaagacacctacggctgttgtagctccagtagaaaaaaccatatccagtgaaaaagcatcaagcactccatcatctgagactcaggaggaatttgtggatgactttcgagttggggagcgagtttgggtgaatggaaataagcctggatttatccagtttcttggagaaacccagtttgcaccaggccagtgggctggaattgttttagatgaacccataggcaagaacgatggttcggtggcaggagttcggtatttccagtgtgaacctttaaagggcatatttacccgaccttcaaagttaacaaggaaggtgcaagcagaagatgaagctaatggcctgcagacaacgcccgcctcccgagctacttcaccgctgtgcacttctacggccagcatggtgtcttcctccccctccaccccttcaaacatccctcagaaaccatcacagccagcagcaaaggaaccttcagctacgcctccgatcagcaaccttacaaaaactgccagtgaatctatctccaacctttcagaggctggctcaatcaagaaaggagaaagagagctcaaaatcggagacagagtattggttggtggcactaaggctggtgtagtccggtttcttggggagaccgactttgccaagggggagtggtgtggcgtggagttagatgagccacttgggaagaatgatggcgctgttgctggaacaaggtattttcagtgtcaacccaaatatggcttgttcgctcctgtccacaaagttaccaagattggcttcccttccactacaccagccaaagccaaggccaacgcagtgaggcgagtgatggcgaccacgtccgccagcctgaagcgcagcccttctgcctcttccctcagctccatgagctcagtggcctcctctgtgagcagcaggcccagtcggacaggactattgactgaaacctcctcccgttacgccaggaagatctccggtaccactgccctccaggaggccctgaaggagaagcagcagcacattgagcagctgctggcggaacgggatctggagagggcggaggtggccaaggccacgagccacgtgggggagatagagcaggagctagctctggcccgggacggacatgaccagcatgtcctggaattggaagccaaaatggaccagctgcgaacaatggtggaagctgctgacagggagaaggtggagcttctcaaccagcttgaagaggagaaaaggaaggttgaggaccttcagttccgggttgaagaagaatcaattaccaaaggtgatcttgagacgcagaccaaactggagcatgcccgcattaaggagcttgaacagagcctgctctttgaaaagaccaaagctgacaaactccagagggagttagaagacactagggtggctacagtttcagaaaagtcacgtataatggaactggagaaagacctagcattgagagtacaggaagtagctgagctccgaagaaggctagagtccaataagcctgctggggatgtggacatgtcactttcccttttgcaagagataagctctttgcaagaaaagttagaagtcacccgtactgaccaccagagagaaataacttctctgaaggagcattttggagcccgggaagaaactcatcagaaggagataaaggctctgtataccgccacggaaaagctttccaaagagaacgagtcattgaaaagcaagctggagcatgccaacaaagagaactcagatgtgatagctctatggaagtccaaactggagactgccatcgcatcccaccagcaggcgatggaagaactgaaggtatctttcagcaaagggcttggaacagagacggcagaatttgctgaactaaaaacacaaatagagaaaatgagactagattaccaacacgaaatagaaaatttgcagaatcaacaagactctgaacgggctgcccatgctaaagagatggaagccttgagggctaaactgatgaaagttattaaagaaaaggaaaacagtctggaagccatcaggtcgaaactggacaaagcagaagaccagcatctcgtagaaatggaagacacgttaaacaaattacaggaagctgaaataaaggtaaaggagctagaggtactgcaagccaaatgcaatgaacaaaccaaggttattgataattttacatcacagctcaaggctactgaagaaaagctcttggatcttgatgcacttcggaaagccagttccgaaggtaaatcggaaatgaagaaacttagacagcagcttgaggcagctgagaaacagattaaacatttagagattgaaaagaatgctgaaagtagcaaggctagtagcattaccagagagctccaggggagagagctaaagcttactaaccttcaggaaaatttgagtgaagtcagtcaagtgaaagagactttggaaaaagaacttcagattttgaaagaaaagtttgctgaagcttcagaggaggcagtctctgttcagagaagtatgcaagaaactgtaaataagttacaccaaaaggaggaacagtttaacatgctgtcttctgacttggagaagctgagagaaaacttagcagatatggaggcaaaatttagagagaaagatgagagagaagagcagctgataaaggcaaaggaaaaactggaaaatgacattgcagaaataatgaagatgtcaggagataactcttctcagctgacaaaaatgaacgatgaattacgtctgaaagaaagagatgtagaagaattacagctaaaacttacaaaggctaatgaaaatgcaagttttctgcaaaaaagtattgaggacatgactgtcaaagctgaacagagccagcaagaagcagctaaaaagcatgaggaagaaaagaaagaattggagaggaaattgtcggacctggaaaagaaaatggaaacaagccacaaccagtgtcaggagctgaaagccaggtatgagagagccacttctgagacaaaaaccaagcatgaagaaatcctacagaacctccagaagacgctgctggacacagaggacaagctgaagggcgcacgggaggagaacagtggcttgctgcaggagctggaggagctgagaaagcaagccgacaaagccaaagctgctcaaacagcggaagatgccatgcagataatggaacagatgaccaaagagaagactgagactctggcctccttggaggacaccaagcaaacaaatgcaaaactacagaatgaattggacacacttaaagaaaacaacttgaaaaatgtggaagagctgaacaaatcaaaagaactcctgactgtagagaatcaaaaaatggaagaatttaggaaagaaatagaaaccctaaagcaggcagcagctcagaagtcccagcagctttcagcgttgcaagaagagaacgttaaacttgctgaggagctggggagaagcagggacgaagtcacaagtcatcaaaagctggaagaagaaagatctgtgctcaataatcagttgttagaaatgaaaaaaagagaatccaagttcataaaagacgcagatgaagagaaagcttccttgcagaaatccatcagtataactagtgccttactcacagaaaaggatgccgagctggagaaactgagaaatgaggtcacagtgctcaggggagaaaacgcctctgccaagtccttgcattcagttgttcagactctagagtctgataaggtgaagctcgagctcaaggtaaagaacttggagcttcaactcaaagaaaacaagaggcagctcagcagctcctcaggtaatacagacactcaggcagacgaggatgaaagagcccaggagagtcagattgatttcctaaattcagtaatagtggaccttcaaaggaagaatcaagacctcaagatgaaggtggagatgatgtcagaagcagccctgaatgggaacggggatgacctaaacaattatgacagtgatgatcaggagaaacagtccaagaagaaacctcgcctcttctgtgacatttgtgactgctttgatctccacgacacagaggattgtcctacccaggcacagatgtcagaggaccctccccattccacacaccatggcagtcggggtgaggaacgcccatactgtgaaatctgtgagatgtttggacactgggccaccaactgcaatgacgacgaaaccttctgatgaagcctccagtggagaactgggcttgctcagacgcactcgcattgacacaacgtaacaccagcattgtgtgtgcagacttcaggagaactcatgttattttttaaccccgtcaacaaatctaggaaaatattttgatcttcaacaaattgccctttagtctccccgtatgagttagaataataaatatttagtaggtgagttttcacctcgaattttgttttcttgatttttacgtttgaagacattgcaccagatgccattacatttattggccccccgaccttgtagaaaaacccctaccctcacaataccttatttaagtaactttaaattatgccgttacttttcatatttgcactaagatatttccaggctgcatttgtatatttagattttttggttaagctttgacactggaatgagttgaaaaaatgtgccattttgcattttcatctactcatttaaagtattttattcttattcaaagaaatatctgagctctttgcactacctgttatcagtagtgcctttacttcaggcttgataatacttaggtgtgattataaaatcatgaagcaggtaaagggaggggcaagcccccaaactgctgtggggacattttataatctatatgctgcacccacttaatctactgtggtgttttgtttattagttttgcataatttcagcttctatatattgtatgtatatattttttaaaaatctatattttgggaaaaaaacatacacaatgtgtctttctttttggacatttacctttttgaaaaagaaaacacttaaaatgatcattaggacataacagactaggccagacatagcatcttgtggctttgcaaccattttcatttgtttgttttccttttatttcttcaccagatttaaataactggaggaattttctccaatttttttttccttctctggcaggtatccccagcagtcaattaacaataagccagtataaaacacctaaataaccaatctacaatctcccttcacaagtttttttactgtttttagatgaatgtacgatgagaaattcaacgttaataattctggattttcttatcacaaaaaagaaaatgaaggacctcaaagcacctgaacagtttatcgaccagtttgaatctatttatcttcatttgaatgtcttctagaatatgtaaaaagtcataaaatgtatcttccatgctacatgtacaataagaacttctataattgtatatatgcctttgatgtattttcccctcaagattatcaactgtgtgttcgacagtgaatattcaatctggtaccagttgaaatttttggttataaatgtaatacgaattgtttcacaaacagaaaacatgtaaagcagtattaaaatttggccaaacaagtgttctgtatctactttaataaatggttattctttaaaaaaaaaaaaaaaaaa

SEQ ID NO: 303 - DNA, 5793 bp, Homo sapiens
gctgctgctgcagtgggacaggtggcggcgaccggcggcgtccgaggagatttaatccagagactgacttcactatagaacccacagttgtatcaatggttggggaaagatagtggcaacaggcaaaggagaaacagctctgacatacaaagaaaatgagtatgctaaagccaagtgggcttaaggcccccaccaagatcctgaagcctggaagcacagctctgaagacacctacggctgttgtagctccagtagaaaaaaccatatccagtgaaaaagcatcaagcactccatcatctgagactcaggaggaatttgtggatgactttcgagttggggagcgagtttgggtgaatggaaataagcctggatttatccagtttcttggagaaacccagtttgcaccaggccagtgggctggaattgttttagatgaacccataggcaagaacgatggttcggtggcaggagttcggtatttccagtgtgaacctttaaagggcatatttacccgaccttcaaagttaacaaggaaggtgcaagcagaagatgaagctaatggcctgcagacaacgcccgcctcccgagctacttcaccgctgtgcacttctacggccagcatggtgtcttcctccccctccaccccttcaaacatccctcagaaaccatcacagccagcagcaaaggaaccttcagctacgcctccgatcagcaaccttacaaaaactgccagtgaatctatctccaacctttcagaggctggctcaatcaagaaaggagaaagagagctcaaaatcggagacagagtattggttggtggcactaaggctggtgtagtccggtttcttggggagaccgactttgccaagggggagtggtgtggcgtggagttagatgagccacttgggaagaatgatggcgctgttgctggaacaaggtattttcagtgtcaacccaaatatggcttgttcgctcctgtccacaaagttaccaagattggcttcccttccactacaccagccaaagccaaggccaacgcagtgaggcgagtgatggcgaccacgtccgccagcctgaagcgcagcccttctgcctcttccctcagctccatgagctcagtggcctcctctgtgagcagcaggcccagtcggacaggactattgactgaaacctcctcccgttacgccaggaagatctccggtaccactgccctccaggaggccctgaaggagaagcagcagcacattgagcagctgctggcggaacgggatctggagagggcggaggtggccaaggccacgagccacgtgggggagatagagcaggagctagctctggcccgggacggacatgaccagcatgtcctggaattggaagccaaaatggaccagctgcgaacaatggtggaagctgctgacagggagaaggtggagcttctcaaccagcttgaagaggagaaaaggaaggttgaggaccttcagttccgggttgaagaagaatcaattaccaaaggtgatcttgaggtggctacagtttcagaaaagtcacgtataatggaactggagaaagacctagcattgagagtacaggaagtagctgagctccgaagaaggctagagtccaataagcctgctggggatgtggacatgtcactttcccttttgcaagagataagctctttgcaagaaaagttagaagtcacccgtactgaccaccagagagaaataacttctctgaaggagcattttggagcccgggaagaaactcatcagaaggagataaaggctctgtataccgccacggaaaagctttccaaagagaacgagtcattgaaaagcaagctggagcatgccaacaaagagaactcagatgtgatagctctatggaagtccaaactggagactgccatcgcatcccaccagcaggcgatggaagaactgaaggtatctttcagcaaagggcttggaacagagacggcagaatttgctgaactaaaaacacaaatagagaaaatgagactagattaccaacacgaaatagaaaatttgcagaatcaacaagactctgaacgggctgcccatgctaaagagatggaagccttgagggctaaactgatgaaagttattaaagaaaaggaaaacagtctggaagccatcaggtcgaaactggacaaagcagaagaccagcatctcgtagaaatggaagacacgttaaacaaattacaggaagctgaaataaaggtaaaggagctagaggtactgcaagccaaatgcaatgaacaaaccaaggttattgataattttacatcacagctcaaggctactgaagaaaagctcttggatcttgatgcacttcggaaagccagttccgaaggtaaatcggaaatgaagaaacttagacagcagcttgaggcagctgagaaacagattaaacatttagagattgaaaagaatgctgaaagtagcaaggctagtagcattaccagagagctccaggggagagagctaaagcttactaaccttcaggaaaatttgagtgaagtcagtcaagtgaaagagactttggaaaaagaacttcagattttgaaagaaaagtttgctgaagcttcagaggaggcagtctctgttcagagaagtatgcaagaaactgtaaataagttacaccaaaaggaggaacagtttaacatgctgtcttctgacttggagaagctgagagaaaacttagcagatatggaggcaaaatttagagagaaagatgagagagaagagcagctgataaaggcaaaggaaaaactggaaaatgacattgcagaaataatgaagatgtcaggagataactcttctcagctgacaaaaatgaacgatgaattacgtctgaaagaaagagatgtagaagaattacagctaaaacttacaaaggctaatgaaaatgcaagttttctgcaaaaaagtattgaggacatgactgtcaaagctgaacagagccagcaagaagcagctaaaaagcatgaggaagaaaagaaagaattggagaggaaattgtcggacctggaaaagaaaatggaaacaagccacaaccagtgtcaggagctgaaagccaggtatgagagagccacttctgagacaaaaaccaagcatgaagaaatcctacagaacctccagaagacgctgctggacacagaggacaagctgaagggcgcacgggaggagaacagtggcttgctgcaggagctggaggagctgagaaagcaagccgacaaagccaaagctgctcaaacagcggaagatgccatgcagataatggaacagatgaccaaagagaagactgagactctggcctccttggaggacaccaagcaaacaaatgcaaaactacagaatgaattggacacacttaaagaaaacaacttgaaaaatgtggaagagctgaacaaatcaaaagaactcctgactgtagagaatcaaaaaatggaagaatttaggaaagaaatagaaaccctaaagcaggcagcagctcagaagtcccagcagctttcagcgttgcaagaagagaacgttaaacttgctgaggagctggggagaagcagggacgaagtcacaagtcatcaaaagctggaagaagaaagatctgtgctcaataatcagttgttagaaatgaaaaaaagagaatccaagttcataaaagacgcagatgaagagaaagcttccttgcagaaatccatcagtataactagtgccttactcacagaaaaggatgccgagctggagaaactgagaaatgaggtcacagtgctcaggggagaaaacgcctctgccaagtccttgcattcagttgttcagactctagagtctgataaggtgaagctcgagctcaaggtaaagaacttggagcttcaactcaaagaaaacaagaggcagctcagcagctcctcaggtaatacagacactcaggcagacgaggatgaaagagcccaggagagtcagattgatttcctaaattcagtaatagtggaccttcaaaggaagaatcaagacctcaagatgaaggtggagatgatgtcagaagcagccctgaatgggaacggggatgacctaaacaattatgacagtgatgatcaggagaaacagtccaagaagaaacctcgcctcttctgtgacatttgtgactgctttgatctccacgacacagaggattgtcctacccaggcacagatgtcagaggaccctccccattccacacaccatggcagtcggggtgaggaacgcccatactgtgaaatctgtgagatgtttggacactgggccaccaactgcaatgacgacgaaaccttctgatgaagcctccagtggagaactgggcttgctcagacgcactcgcattgacacaacgtaacaccagcattgtgtgtgcagacttcaggagaactcatgttattttttaaccccgtcaacaaatctaggaaaatattttgatcttcaacaaattgccctttagtctccccgtatgagttagaataataaatatttagtaggtgagttttcacctcgaattttgttttcttgatttttacgtttgaagacattgcaccagatgccattacatttattggccccccgaccttgtagaaaaacccctaccctcacaataccttatttaagtaactttaaattatgccgttacttttcatatttgcactaagatatttccaggctgcatttgtatatttagattttttggttaagctttgacactggaatgagttgaaaaaatgtgccattttgcattttcatctactcatttaaagtattttattcttattcaaagaaatatctgagctctttgcactacctgttatcagtagtgcctttacttcaggcttgataatacttaggtgtgattataaaatcatgaagcaggtaaagggaggggcaagcccccaaactgctgtggggacattttataatctatatgctgcacccacttaatctactgtggtgttttgtttattagttttgcataatttcagcttctatatattgtatgtatatattttttaaaaatctatattttgggaaaaaaacatacacaatgtgtctttctttttggacatttacctttttgaaaaagaaaacacttaaaatgatcattaggacataacagactaggccagacatagcatcttgtggctttgcaaccattttcatttgtttgttttccttttatttcttcaccagatttaaataactggaggaattttctccaatttttttttccttctctggcaggtatccccagcagtcaattaacaataagccagtataaaacacctaaataaccaatctacaatctcccttcacaagtttttttactgtttttagatgaatgtacgatgagaaattcaacgttaataattctggattttcttatcacaaaaaagaaaatgaaggacctcaaagcacctgaacagtttatcgaccagtttgaatctatttatcttcatttgaatgtcttctagaatatgtaaaaagtcataaaatgtatcttccatgctacatgtacaataagaacttctataattgtatatatgcctttgatgtattttcccctcaagattatcaactgtgtgttcgacagtgaatattcaatctggtaccagttgaaatttttggttataaatgtaatacgaattgtttcacaaacagaaaacatgtaaagcagtattaaaatttggccaaacaagtgttctgtatctactttaataaatggttattctttaaaaaaaaaaaaaaaaaa

SEQ ID NO: 304 - DNA, 4036 bp, Homo sapiens
ggcggattgtctgtcgttgcagtagctgtaggaaggggaggccattttccgtttctgggaggagtgaggggcaacgggtcggagaaaaaggaaaaaagaagggctcagcgcctccccgccgggccgtggacagaggggcacagtttcggcaggcgggtgaggtcgctgagggcccgccggagatgttttccttgtcgagcacggtgcaaccccaggttacagttcctctgagtcatctcatcaatgccttccatacaccaaaaaacacttctgtttctctcagtggagtgtcagtttctcaaaaccagcatcgagatgtagttcctgagcatgaggctcccagcagtgagtgtatgttcagtgacttcctgacgaagcttaacattgtttcaattggcaaaggaaaaatattcgaagggtacagatccatgttcatggagccagcaaaaaggatgaagaagagcttggacacaaccgataactggcacatccgtccagaacccttctccctctcaatccctccttcacttaacttaagggaccttggattatctgaactaaaaattggacagattgatcagctggtagaaaatctacttcctggattttgtaaaggcaaaaacatttcttcccattggcatacatcccatgtctctgcacaatccttctttgaaaataaatatggtaacttagatatatttagtacattacgttcctcttgcttgtatcgacatcattcaagagctcttcaaagcatttgttcagatcttcagtactggccagttttcatacagtctcggggttttaaaactttgaaatcaaggacacgacgtctccagtctacctccgagagattagctgaaacacagaatatagcgccatcattcgtgaaggggtttcttttgcgggacagaggatcagatgttgagagtttggacaaactcatgaaaaccaaaaatatacctgaagctcaccaagatgcatttaaaactggttttgcggaaggttttctgaaagctcaagcactcacacaaaaaaccaatgattccctaaggcgaacccgtctgattctcttcgttctgctgctattcggcatttatggacttctaaaaaacccatttttatctgtccgcttccggacaacaacagggcttgattctgcagtagatcctgtccagatgaaaaatgtcacctttgaacatgttaaaggggtggaggaagctaaacaagaattacaggaagttgttgaattcttgaaaaatccacaaaaatttactattcttggaggtaaacttccaaaaggaattcttttagttggacccccagggactggaaagacacttcttgcccgagctgtggcgggagaagctgatgttcctttttattatgcttctggatccgaatttgatgagatgtttgtgggtgtgggagccagccgtatcagaaatctttttagggaagcaaaggcgaatgctccttgtgttatatttattgatgaattagattctgttggtgggaagagaattgaatctccaatgcatccatattcaaggcagaccataaatcaacttcttgctgaaatggatggttttaaacccaatgaaggagttatcataataggagccacaaacttcccagaggcattagataatgccttaatacgtcctggtcgttttgacatgcaagttacagttccaaggccagatgtaaaaggtcgaacagaaattttgaaatggtatctcaataaaataaagtttgatcaatccgttgatccagaaattatagctcgaggtactgttggcttttccggagcagagttggagaatcttgtgaaccaggctgcattaaaagcagctgttgatggaaaagaaatggttaccatgaaggagctggagttttccaaagacaaaattctaatggggcctgaaagaagaagtgtggaaattgataacaaaaacaaaaccatcacagcatatcatgaatctggtcatgccattattgcatattacacaaaagatgcaatgcctatcaacaaagctacaatcatgccacgggggccaacacttggacatgtgtccctgttacctgagaatgacagatggaatgaaactagagcccagctgcttgcacaaatggatgttagtatgggaggaagagtggcagaggagcttatatttggaaccgaccatattacaacaggtgcttccagtgattttgataatgccactaaaatagcaaagcggatggttaccaaatttggaatgagtgaaaagcttggagttatgacctacagtgatacagggaaactaagtccagaaacccaatctgccatcgaacaagaaataagaatccttctaagggactcatatgaacgagcaaaacatatcttgaaaactcatgcaaaggagcataagaatctcgcagaagctttattgacctatgagactttggatgccaaagagattcaaattgttcttgaggggaaaaagttggaagtgagatgataactctcttgatatggatgcttgctggttttattgcaagaatataagtagcattgcagtagtctacttttacaacgctttcccctcattcttgatgtggtgtaattgaagggtgtgaaatgctttgtcaatcatttgtcacatttatccagtttgggttattctcattatgacacctattgcaaattagcatcccatggcaaatatattttgaaaaaataaagaactatcaggattgaaaacagctcttttgaggaatgtcaattagttattaagttgaaagtaattaatgattttatgtttggttactctactagatttgataaaaattgtgcctttagccttctatatacatcagtggaaacttaagatgcagtaattatgttccagattgaccatgaataaaatattttttaatctaaatgtagagaagttgggattaaaagcagtctcggaaacacagagccaggaatatagccttttggcatggtgccatggctcacatctgtaatcccagcacttttggaggctgaggcgggtggattgcttgaggccaggagttcgagaccagcctggccaacgtggtgaaacgctgtctctactaaaatacaaaaaaatagggctgggcgcggttgctcacgcctgtaatcccagcacttttcagaggccaaggcgggcaaatcacctgaggtcaagagtttgagaccagcctggccaacatggtgaaaccccatctctactaaacatgcaaaaattacctgggcatggtggcaggtgcttataatcccagctactctgggggccaaggcaggagaattgcttgagcctgggagatggaggttgcagtgagctgagatcatgccactgcactccagcctgggcaacagagcaagactctgcctcaaaaaaaaattaaaataaatttaaatacaaaaaaaaatagccaggtgtggggtgcatgcctggaatcccagctacttgagaggctgaggcacgagaattgcttgaacccaggaggtggaggttgcagtgagccaagatcacaggagccactgcactccagcctgggtgacagagtgagactctgtctcaaaaaaaaattaaataaattattataacctttcagaaatgctgtgtgcattttcatgttcttttttttagcattactgtcactctccctaatgaaatgtacttcagagaagcagtattttgttaaataaatacataacctcattctgaataatgtccctcattttgactataactgtgcttggtttcaaaagcaaaattaaacaaaaatctcagtcccctccgaagtgaactttgtgttaccctgcgtcagaaatgccaagttgtgtttacttttcattcagattttgtgaatatgaacatgctgttataggatctacagatgaatatttaactcaatagaaaaattattttagaacacattgtattggtattacaaccagattatattcttgacgttgacttcattaaaattatctacaatttcctaataaaaaaaaaaa

SEQ ID NO: 305 - DNA, 704 bp, Homo sapiens
cacgttccctccacaaaatgcctggcgaagccacagaaaccgtccctgctatagagcagcagttgctgcagccccaggctgagacagggtctggaacagaatctgacagtgatgagtcagtaccagagcttgaagaacaggattccacccaggtaaccgcacaagtccagttggtggtagcagctgaaattgatgaagaaccagtcagtaaagcaaaacagaggcggagtgaaaagaaggcacggaaggctaggttcaaactgggtcttcaacaggttacaggagttactagagtcaccatccggaaatctaagaatatcctctttgtcatcacaaaaccagatgtctacaagagcccgcttcggatacctacatggtttttggggaagccaagattgaagatttatctcaggaagcacaactagcagctgctgagaaattcaaagttcaaggtgaagctgtctcaaacattcaagaaaacacacagactccaactgtacaagagggcagtgaagacgaagaggtcgatgaaacaggtgtagaaattaaggatatagaattggtcctgtcacaagcaaatgtgtggggagcaaaggcagtccgagccctgaagaacagtaatgatattgtaaatgctattatggaattaacaatgtaaccatctgaaagcaacttttttggtgtctcagatgagtaactgcaga

SEQ ID NO: 306 - DNA, 1497 bp, Homo sapiens
ggggggaggcgttccggtccccaagagacccgcggagggaggcggaggctgtgagggactccgggaagccatggacgtcgagaggctccaggaggcgctgaaagattttgagaagagggggaaaaaggaagtttgtcctgtcctggatcagtttctttgtcatgtagccaagactggagaaacaatgattcagtggtcccaatttaaaggctattttattttcaaactggagaaagtgatggatgatttcagaacttcagctcctgagccaagaggtcctcccaaccctaatgtcgaatatattccctttgatgaaatgaaggaaagaatactgaaaattgtcactggatttaatggtatcccttttactattcagcgactatgtgaattgttaacagatccaaggagaaactatacaggaacagacaaatttctcagaggagtagaaaagaatgtgatggttgttagctgtgtttatccttcttcagagaaaaacaattccaatagtttaaatcgaatgaatggtgttatgtttcctggaaattcaccaagctatactgagaggtctaatataaatgggcctgggacacccaggccacttaatcgaccaaaggtttctttgtcagcccccatgacaacaaatgggttgcctgagagcacagacagcaaagaggcaaatttgcagcaaaatgaggagaaaaatcacagtgactcttcgacctctgaatcagaagtttcctcagtgagccctttgaaaaataaacatccagatgaagatgctgtggaagctgaggggcatgaggtaaaaagactcaggtttgacaaagaaggtgaagtcagagaaacagccagtcaaacgacttccagcgaaatttcttcagttatggtaggagaaacagaagcatcatcttcatctcaggataaagacaaagatagccgttgtacccggcagcactgtacagaagaggatgaagaagaggatgaagaggaagaagaagagtcttttatgacatcaagagaaatgatcccagaaagaaaaaatcaagaaaaagaatctgatgatgccttaactgtgaatgaagagacttctgaggaaaataatcaaatggaggaatctgatgtgtctcaagctgagaaagatttgctacattctgaaggtagtgaaaacgaaggccctgtaagtagtagttcttctgactgccgtgaaacagaagaattagtaggatccaattccagtaaaactggagagattctttcagaatcatccatggaaaatgatgacgaagccacagaagtcaccgatgaaccaatggaacaagactaactatttagaaacatttagatgcagtattttacatacagttctggttttaacactgtataaaacttttgtgtaataaaatggacctttagttttacaagagaagcaggttgtaaaataaagtactttatggataattccgcaaaaaaaaaaaaaaaaaaaaaaaaaaaaaaaaa

SEQ ID NO: 307 - DNA, 5845 bp, Homo sapiens
ggcggtggagtcctgagctagtcgtgtcccggcctccagcggcggcagcggcgacggcggcggcagcaggaggcggagggagagcaggagccactgagatgaggaggcgtcgcgcgcgcctgtagctcgcgggcctcgcagtttgcttgcctaaactggacttgaagcaatttaaactactggagatctgccattttataatatcacaattggaaagaaacagattttcaaataatggaagagtctaaaaccttaaaaagtgaaaatcatgaaccaaagaagaatgttatttgtgaagaaagcaaagcagttcaagttataggtaatcaaacattgaaagctagaaatgataaatccgtaaaagaaattgagaacagctctccaaataggaatagtagtaaaaaaaataagcaaaatgatatttgtatagaaaaaacagaagttaaatcatgtaaagtaaatgctgccaaccttccaggtcctaaagatttggggttagtccttcgagatcaaagtcattgcaaagcaaaaaaatttcctaattcaccggtgaaagccgaaaaggcaaccatttcacaggcaaaatcagaaaaggcaaccagtttacaggcaaaagcagaaaaatcaccaaagtcacctaattcagtgaaagcagaaaaagcatccagttatcagatgaagtcagaaaaagtaccaagttcaccagcagaagcagaaaagggacccagtttactgttgaaagacatgagacagaagacagaattacaacagattggaaaaaaaattccaagctcctttacttctgtggacaaagtgaatattgaagctgtagggggagaaaaatgtgctctgcaaaactcaccacgatctcagaagcaacagacatgtacagataatactggtgattctgatgatagtgcttcaggaattgaagacgtatcggacgatttaagtaaaatgaagaatgatgaatctaataaagaaaattcttcagagatggactacttagaaaatgccactgtgatagatgaatctgcattgacacctgagcagaggctggggttgaaacaagcagaagaacgcttagaaagagatcacatctttcgacttgaaaaacgatcaccagaatataccaattgtcggtatctatgcaaactttgcttaattcacattgaaaatatccagggggctcataaacatataaaggagaaacgacataagaaaaatattttggaaaaacaagaagaaagtgagcttcgttctctgccacctccttcccctgcccacttggctgctttaagtgttgcagtcattgaattagcaaaagaacatggaataacagatgatgacctcagagtccgtcaggaaattgtggaggaaatgtcaaaggttataacgacatttttaccagaatgttcacttaggttgtatggctcatctctgactagatttgctctgaaaagtagtgatgttaatatagatataaaatttcctcccaagatgaatcatccagatcttctgataaaagtacttgggattttaaagaaaaatgtattatatgtagatgtggaatctgattttcacgctaaagttcctgttgtggtgtgcagagatcgaaaaagtggtttactttgtagagtgagtgcaggaaacgatatggcatgtctcactactgatttacttactgcccttggcaaaatagaacctgtctttattcccttggtgttagcctttcgctactgggctaagttgtgctatattgactcccaaactgatggtggaatcccttcttactgttttgctttaatggtgatgttttttctacaacagagaaaaccccctcttcttccttgcttacttggaagttggattgaaggctttgacccaaaaagaatggatgactttcagctgaagggcatagtagaagagaagtttgtgaagtgggaatgtaattcaagtagtgcaactgagaaaaactcaattgctgaggaaaacaaagctaaggcagaccaaccaaaagatgataccaagaagacagaaacagacaaccaaagtaatgccatgaaggaaaaacatggcaaatctcctttagcattggaaacaccaaatcgggtatccttgggacagttatggttagagctgcttaaattctacacactggattttgctttggaggaatatgtcatatgtgtacggatacaagatattttaacaagagaaaataaaaactggcctaaaaggcgaatagccattgaagatccattttcagtcaagaggaatgttgcacggagcttaaacagccagctggtttacgaatatgttgtggagagatttagggcagcttatcggtattttgcctgtcctcagacgaagggtggaaataagtctacagtggatttcaagaaaagagagaaggggaaaataagcaataagaaaccagtcaagtcgaacaatatggcaaccaatggttgtattctgcttggggaaaccacagaaaaaataaatgcagaaagagagcaacctgttcaatgtgatgaaatggactgtacatcacagagatgtattattgacaacaacaatttgttggtaaatgaactagattttgctgaccacggacaggactcttcatctctttctaccagcaaaagcagtgaaatagagccaaaattagataagaaacaagatgatttagcgccttcagaaacttgtttaaaaaaagagctcagccaatgtaattgcattgatttgtctaagtcgcctgacccagataaatctactggaacagactgcaggtcaaatttagaaacagagagttcacatcagagtgtgtgcaccgacacatctgctacctcttgcaactgcaaagctacagaagatgcttctgaccttaatgatgatgataacctccccacccaggaattatattatgtgtttgataagtttattttaacctctggcaagccaccaacgatagtatgcagcatctgcaaaaaggatggccattcaaagaatgattgcccagaggattttaggaaaattgatttaaaacctctaccaccaatgacaaaccgatttcgggaaatacttgatttagtatgtaaaagatgttttgatgagttatcaccaccttgttctgaacaacacaacagggagcaaattttaattggcttggaaaagtttattcaaaaagaatatgatgaaaaggcaaggttgtgcttatttggctcttctaagaatggatttggatttcgtgatagtgatctggatatttgtatgaccctggaaggccatgaaaatgcagagaaattaaattgtaaggaaataattgaaaatttggcaaaaattcttaagagacatccaggtttaagaaacattttgcctataactactgccaaagtgcctatagtaaaatttgaacacaggcgaagtgggttagaaggcgatatcagtttatataatacgttggctcaacataacacaagaatgctagctacttatgcagctattgatcctagagtgcagtatttgggatatactatgaaagtgtttgctaagcgatgtgacattggggatgcttccaggggaagtttatcttcatatgcatatatccttatggtgctgtactttctgcagcagagaaagccacctgttatcccagttctacaagagatctttgatggaaaacagattccacagagaatggttgatggatggaatgctttcttctttgataaaacagaagaactgaaaaagcgtttaccttcacttggaaagaacacagaatcattaggggagctttggctgggactgcttcgtttctatactgaagagtttgatttcaaggaatatgtaattagcattcggcagaaaaagctgttgacaacttttgagaagcagtggacttccaagtgcattgcaattgaagacccttttgacttgaatcataaccttggtgctggagtttccagaaaaatgaccaatttcatcatgaaagcatttatcaatggaaggaaactttttggtacccctttttatccactcattggcagagaagctgagtacttctttgattccagagtattaacagatggagaactggctcccaatgatagatgttgccgtgtgtgtggaaaaataggccactacatgaaagactgccctaaaaggaaaagcagtttactgtttagactaaagaagaaagacagtgaagaagagaaggaagggaatgaagaagagaaagattcccgagatgttcttgacccccgagacctccacgatactcgagactttagagacccgagagacctcagatgttttatatgtggagatgctggacatgtacgaagggagtgcccagaggtcaagctggcccgtcagaggaatagcagtgtggcagcagcccagctggtccgcaaccttgtaaatgctcaacaggtggctggttcagctcagcaacagggtgatcagtccataaggactagacagtcatcagaatgttctgaatcaccatcttattctcctcagcctcagccatttccacagaactcttcccagtcagctgctattactcagccttcatctcagccaggatcccaacctaagcttggcccacctcagcagggagcccaacctccccatcaggtccagatgccactgtataactttccccagtcaccaccagctcagtattctcccatgcacaatatgggattgttgccaatgcaccctctccagatccctgccccgtcctggcccatccatggcccagtgatccactctgcaccaggcagtgcccccagcaatattggcctaaatgatcccagcatcatctttgcacagcctgctgccagacctgtggcaatccctaacacgtctcacgatggacactggccccgtactgtggctccaaattccctggtaaacagtggtgcagtggggaattcagagccaggctttcgaggactgactcctccaattccttgggaacatgcaccgcgtccccatttcccccttgtcccagcttcgtggccttatggtttgcatcaaaacttcatgcatcagggaaatgcccgattccagcccaacaaacctttctatactcaagacagatgtgccacccgtcggtgtagagagcgttgtccccacccaccaagaggaaacgtgtcggagtaatgcgagtccattttctttcagctggtctaccgatgcacagcaaccagccaatcctgctgtctcaagggtatccgtacctcaatgtcagttacattcagcagaaaaagtgacatttaatggaaagcaaaacaaatcaggtcctgatttaaaattttaacacgtttagatagcttatttaaattctaagactgtttttacagactgtattatttgtatataaatatgaactatagtttttactagtatcaccaaattgagtgatacaaatttcatctattttattaccctatttttaagggaattttatgttttgtttaaccttgatgaattgtataaagagagaatttaaaaaattacattctttattttctattagctgtattcatactttggttgcttcagactttatatattgttcttaaaagttaggaaagaatttcatgtgttttaaattgtcacttctattctttacagaaccttgtagtgccaaaaactttttaaaaggtaaaaaaataaaataaaattacaacatgaagattcagattttttttcttttccatacttgtatattgaacattcaaacttgaatggaaagttgattttgtctgtatttgaagtacttctattttaagttaataaatctttttgacaagagttaaaaaaaaaaaaaaaa

SEQ ID NO: 308 - DNA, 2022 bp, Homo sapiens
ccacgcgtccgcccacgcgtccgcccacgcgtccgcttcggggtgggcgtaagatggcgacagcagcgcagggacccctaagcttgctgtggggctggctgtggagcgagcgcttctggctacccgagaacgtgagctgggctgatctggaggggccggccgacggctacggttacccccgcggccggcacatcctctcggtgttcccgctggcggcgggcatcttcttcgtgaggctgctcttcgagcgatttattgccaaaccctgtgcactctgtattggcatcgaggacagtggtccttatcaggcccaacccaatgccatccttgaaaaggtgttcatatctattaccaagtatcctgataagaaaaggctggagggcctgtcaaagcagctggattggaatgtccgaaaaatccaatgctggtttcgccatcggaggaatcaggacaagcccccaacgcttactaaattctgtgaaagcatgtggagattcacattttatttatgtatattctgctatggaattagatttctctggtcgtcaccttggttctgggacatccgacagtgctggcataactatccatttcagcctctttcaagtgggctttatcactattatatcatggaattggccttctattggtcccttatgttttctcagtttacagacattaaaagaaaggacttcctgatcatgtttgtgcatcacttggtcaccattgggcttatctccttctcctacatcaacaatatggttcgagtgggaactctgatcatgtgtctacatgatgtctcagacttcttgctggaggcagccaaactggccaattatgccaagtatcagcggctctgtgacaccctttttgtgatcttcagtgctgtttttatggttacacgactaggaatctatccattctggattctgaacacgaccctctttgagagttgggagataatcgggccttatgcttcatggtggctcctcaatggcctgctgctgaccctacagcttctgcatgtcatctggtcctacctaattgcacggattgctttgaaagccttgatcaggggaaaggtatcgaaggatgatcgcagtgatgtggagagcagctcagaggaagaagatgtgaccacctgcacaaaaagtccctgtgacagtagctccagcaatggtgccaatcgggtgaatggtcacatgggaggcagctactgggctgaagagtaaggtggttgctatagggacttcagcacacatggacttgtagggccactggcaacatactcctcttggcccttcccatatctactcttctgtgattgggagactgcaaggcactgaggagtatcaaagaagcaaatattttcactttgaaagaaaactgccattttgtatttaatagcctccaggttctttcagtaatgttatttgctctgtgtgtttttgtgtgtttgttgatgtgcgtttgtgcatatgcgtgagtttcattgccggggttggggcacaattgtggactggggccatgaggccttccctggtccccactgaacccaccttagttccacatttggctgcatcttgaattatgccaactccagacttctccttcttttttgcccttggctcttgacactctaaacccctggaccatctgaatggagcagccaagttcagtcccacatttctgtactgttcctctttcacagctggaatatgtcacatgatgaagttgtatagaaacagaaccatggatggatggccaggattgccgtggtccctagctagatccccttcctatcaatcacctgatagcaacagggacagctgccaataccctgctctttactcaatggtacccagggagggagcatgggaagagggtgagctgagggctggaggagggcaacagccactgggtgagctgttcacggtcttatactattgtttgtttgtgattaaaagtgcttcaacccaaaaaaaaaaaaaaaaaaaaaaaaaaaaaaaaaaaaaaaaaaaa

SEQ ID NO: 309 - DNA, 1791 bp, Homo sapiens
atacgccggggcggggccgagagtttggagccccggagtggggtgtcggcgcctcattcgggtggagctgagccggagacaggcagttgtgaaaaacttcaggacaaaaatgtttcatttaaggacttgtgctgctaagttgaggccattgacggcttcccagactgttaagacattttcacaaaacagaccagcagcagctaggacatttcaacagattcggtgctattctgcacctgttgctgctgagccctttctcagtgggactagttcgaactatgtggaggagatgtactgtgcttggctggaaaaccccaaaagtgtacataagtcatgggacattttttttcgcaacacgaatgccggagccccaccgggcactgcctaccagagtccccttcccctgagccgaggctccctggctgctgtggcccatgcacagtccctggtagaagcacagcccaacgtggacaagctcgtggaggaccacctggcagtgcagtcgctcatcagggcatatcagatacgagggcaccatgtagcacagctggaccccctggggattttggatgctgatctggactcctccgtgcccgctgacattatctcatccacagacaaacttgggttctatggcctggatgagtctgacctcgacaaggtcttccacttgcccaccaccactttcatcgggggacaggaatcagcacttcctctgcgggagatcatccgtcggctggagatggcctactgccagcatattggggtggagttcatgttcatcaatgacctggagcagtgccagtggatccggcagaagtttgagacccctgggatcatgcagttcacaaatgaggagaaacggaccctgctggccaggcttgtgcggtccaccaggtttgaggagttcctacagcggaagtggtcctctgagaagcgctttggtctagaaggctgcgaggtactgatccctgccctcaagaccatcattgacaagtctagtgagaatggcgtggactacgtgatcatgggcatgccacacagagggcggctgaacgtgcttgcaaatgtcatcaggaaggagctggaacagatcttctgtcaattcgattcaaagctggaggcagctgatgagggctccggagatgtgaagtaccacctgggcatgtatcaccgcaggatcaatcgtgtcaccgacaggaacattaccttgtccttggtggccaacccttcccaccttgaggccgctgaccccgtggtgatgggcaagaccaaagccgaacagttttactgtggcgacactgaagggaaaaaggtaaggcccagagagaggcgtgcaaggcagatcgtcaaggccccatgttccagcatggagttccgctcaccaacataacccagagccctgggtgcatctagactttaaaaaaatatttaaagtcggccgggcgcagtgtctcacgcctgtaatcccagcactttgggaggccgaggtgggcagatcacctgagttcgggagttggagaccagcctgaccaacatggagaaactccatctctactaaaaatacaaaattagctgggcgtggtggcgcgcgcctgtaatcccagctactcaggaggctgaggcaggagaatcgcttgaacccgggaggtggaggttgcagtgagccgagattacgccattgcactccagcctgggccaacaagagcgaaactctgtctcaaagaaaaaaataaataaataaaaaatatatgtatatgtaaaaaaaaaaaaaaaaaaaaaaaaaaaaaa

SEQ ID NO: 310 - DNA, 1979 bp, Homo sapiens
ggagcctgagccctgcggaacctcggcgctcggccccaccccgcccgtacctgcacttatttattgttgttatttcttaccgcggagccccgcagtcgggtcctcccgcccgctcccgcgcagcgctagcattctccagtccctcagtcccttcccgcgcggtgcgccgcagccgaggcgatgcgcctcattcagaacatgtgcaccatcgccgagtaccccgcgccgggcaacgccgcggcctccgactgctgtgtgggcgccgccggccgccgcctggtcaagatcgccgtggtgggcgccagcggcgtgggcaagaccgcactggtggtccggttcctcaccaaacgattcatcggtgactatgaaagaaatgcaggtaatctctatactagacaagttcagatagaaggtgaaaccctggctcttcaggttcaagacactccaggtattcaggtccatgagaacagcctgagctgcagtgaacagctgaataggtgcattcgctgggcagatgctgtggtgatcgttttctccatcactgactacaagagctatgaactcatcagccagctccaccagcacgtgcagcagctacacctgggcacccggctgcctgtggtggtcgtggccaacaaagctgacctgttgcacatcaaacaggttgaccctcagcttggactgcagctagccagcatgctaggctgctcattctatgaagtgtctgtcagtgaaaattataatgatgtctacagcgccttccacgtcctctgtaaagaggtcagtcacaaacagcagcctagcagtacacccgagaagcgaagaacctccctcattcccaggcccaagtcacccaacatgcaggacctgaagaggaggtttaagcaagccctctctgccaaagtgaggactgtcacctccgtctgaagcaggaggagcactcaagggggtttggtcttcccaggaagagggcctgaggttctcctagtgcaggaacgttgaatattggcaatgattcctggttccagaaagggctggagcagaagggccaagagggcctgtggaactgctacagaaaaggaagtgttgttctgagcagggggacaggattgatgaggcttgaaagagcccactgagccactctctgaatatgtgaaatgtactctgtgtcttttcctttagagtggggagggggcataatcgtttcggtttctgcattcaactaccttgtaaatggtggtccgttgcagtttcaccaaatgtattgatgtgatttacagtgggaatgaaagaacagattaagcattgataggctttcttttttcccccttttttcttttttctcttttcttctttcttttcctctttttccccaagaggaagaattgcttttctcttaccagtatgatttgtaactctggaacactattcttacagaatgcctttctaacctgaaggatacccagatttctttctttatgtacaagatggaaaatcccctacccctcaaaaacaggttgagtttatgggccagaatattttgtataccagacattggtaagctctcatggtttacaggaaggctctggttccccctcacaggatgagcatgctcagttgggcgtgtgtggaggagctgtgaacttcacgctcttcaaccccagactttgactgtatagttttttgtttttttaactgttccatcaggaaaaaaatgtgtcagttgattttggtgtgacttgtgtaaatggttcatggcaatgacgttgggttgcttcctaggcctggctgagttgtgcctaagggtggctgaaatactaaaacacttatcttacagcaagtgaacaggggctacctgccacatcccctccacagatgcactttaaaaagccactcatgctttggcttaaactgtaattaatttattttatgtacaataaatcgcatttgaaaaagaaaaaaaaaaaaaaaaaaaaaaa

SEQ ID NO: 311 - DNA, 1465 bp, Homo sapiens
ccctgtgccagccggctgtcgacccaggttaggaagcccgaggtcggggcgttaccccaagggccctcccgcttcccctccgagggcagagaggcgtccgcgcccggacgcactgcgggaacacctggagccccggcggagctcggctgtccccgcgggagggagcccgacgcgcatccttgggacccggacccggcgcccgcgcctcgggacggatttctgcctcggctgcaggcgcagcgcgcagacctgagcctgccccgcggaaccggggctcgagtcccggcccgagcgcggcgtcggggccagcggagaggggcggaagccgcaagggaccctcggcgcctcggcctggccgcgatgaagtccccgcccctcctcagcccgtgtctctcctggaagagaatggcgggcatctttttcctgccatttatctcatcaggttttgctcctcggtttaagcaggaagagaacttcatgcttggaagagcgcatccgtcccagcctaggtttaattggtctcatctgacccctctggagctgaagaatcgatctgtgggacttggaactgaaagcacaggtcggggtaagccccacttcacactggagggccacaagttcctgatcttcgggggctccatccactatttccgggtgcccagggagtactggagggaccgcctgctgaagctgaaggcctgtggcttcaatactgtcaccacctatgttccgtggaacctgcatgagccagaaagaggcaaatttgacttctctgggaacctggacctggaggccttcgtcctgatggccgcagagatcgggctgtgggtgattctgcgtccaggcccctacatctgcagtgagatggacctcgggggcttgcccagctggctcctgcaagacccccggttactgttgaggacaaccaacaagagcttcattgaagcagttgagaagtattttgaccacctgattcccagagtgattcctctccagtaccgccaggcaggccctgtcatcgcggtgcaagtggagaatgagtatggctcattcaataaggataaaacatacatgccgtatctccacaaggccctgctgagaagagggattgtggagcttctcttgacctctgatggtgagaaacatgtgctgagtggccacaccaaaggagtgttggccgccatcaatttgcaaaaacttcaccaggatactttcaatcagcttcataaagtccagggagccagtatagatgcaggactgctctcagatgcctcacaagcagcaacttcttcctccttatagttcttatctgtgattcttccataattttgtccttctaagcttctgatgcactgaattatgtaaagtgcattcccttcaccagcttgtgcaccctattctgtaactgataataaatggttggtattgcaaaaaaaaaaaaaaaaaaaaaaaaaaaaaaaaaaaa

SEQ ID NO: 312 - DNA, 1942 bp, Homo sapiens
caggaactgtgaagggtagatttgctgaaatggagaaacaaagacaagaggaacaaaggaagagaacggaggaggaacgaaaacgcagaattgagcaggatatgttagaaaagaggaaaatacagcgtgaattagcaaaaagggctgaacagattgaggacataaacaatacgggaactgaatcagcatcagaggaaggagatgattcactacttataactgtggtacctgtcaaatcatataaaacatctggaaaaatgaaaaagaattttgaggatctagaaaaagaacgtgaagagaaagaaaggatcaagtacgaggaagataaaagaataagatatgaagaacaacgaccatctctcaaggaagcaaagtgtctttcattagttatggatgatgaaatagaaagtgaagcaaaaatttttaaagggtaccgccctggtaaactcaaactcagttttgaagaaatggaaaggcaaagaagagaagatgaaaaaaggaaagcagaagaagaagccagaaggagaatagaggaagaaaagaaggcgtttgctgaagcaaggagaaatatggtagtagatgatgactccccagagatgtataagacaatctctcaagaatttcttacaccgggaaaactggaaattaattttgaagaattattaaaacaaaaaatggaagaagaaaaacgacgaacagaggaggaacggaagcataagctagaaatggagaaacaagaatttgaacaactgagacaggaaatgggagaggaagaggaagaaaatgaaacctttggattgagcagagaatatgaagaactgatcaaattaaaaaggagtggctctattcaagctaaaaacctaaaaagcaagtttgaaaaaattggacagttgtctgaaaaagaaatacagaaaaaaatagaagaagagcgagcaagaaggagaacaattgaccttgaaattaaagagcgagaagctgaaaattttcatgaggaagatgatgttgatgttaggcctgcaagaaaaagcgaggctccatttactcacaaagtgaatatgaaagctagatttgaacaaatggctaaggcaagagaagaagaagaacaaagaagaattgaagaacaaaagttactacgcatgcagtttgaacaaagggaaattgatgcagcactacaaaagaaaagagaagaggaggaggaggaagaaggtagcatcatgaatggctccactgctgaagatgaagagcaaaccagatcaggagctccatggttcaagaagcctcttaaaaacacatcagttgtagacagtgagccagtcagatttacggttaaagtaacaggagaacccaaaccagaaattacatggtggtttgaaggagaaatactgcaggatggagaagactatcaatatattgaaaggggagaaactcactgcctttacttaccagaaactttcccagaagatggaggagagtatatgtgtaaagcagtcaacaataaaggatctgcagctagtacctgtattcttaccattgaaagtaagaattaatcactctttttatcttttattctattaatttttttttccttaaaatcacttttcttcttctcttttttagctgatgactactagctcccctcccctctccctggaactttctctttcactccaactttcttactacatccatcttttctgtggcggggccaaaaaaggaaaccaggagtgccactatgctgacttcttattccttttcataacagtcttcaaagcacagctcatctaaagaatgcctacttcttttccaaataagcatcagatttatcgcctattatgcagtaacagtcaataaaatgtacttatgggggggaattactcaattattctatcagaacctattataaagactgtatttcccatagacgtttacagcaactatgttt

SEQ ID NO: 313 - DNA, 3003 bp, Homo sapiens; identical to SEQ ID NO: 297

SEQ ID NO: 314 - DNA, 2941 bp, Homo sapiens; identical to SEQ ID NO: 121

SEQ ID NO: 315 - DNA, 9771 bp, Homo sapiens
gccgaggctgcctgactggaatgagggtagctgcggcgactgcggcggctggagcggggccggccatggcggtgtggacgcgggccaccaaagcggggctggtggagctgctcctgagggagcgctgggtccgagtggtggccgagctgagcggggagagcctgagcctgacgggcgacgccgccgcggccgagctggagcccgctctgggacccgcggccgccgccttcaacggcctcccaaacggcggcggcgcgggcgactcgctgcccgggagcccaagccgcggcctggggcccccgagcccgccggcgccgcctcggggccccgcgggtgaggcgggcgcgtcgccgcccgtgcgccgggtgcgggtggtgaagcaagaggcgggcggcctgggcatcagcatcaagggcggccgcgagaaccggatgccgatcctcatctccaagatcttccccgggctggctgccgaccagagccgggcgctgcggctgggcgacgccatcctgtcggtgaacggcaccgacctgcgccaggccacccacgaccaggccgtgcaggcgctgaagcgcgcgggcaaggaggtgctgctggaggtcaagttcatccgagaagtaacaccatatatcaagaagccatcattagtatcagatctgccgtgggaaggtgcagccccccagtcaccaagctttagtggcagtgaggactctggttcgccaaaacaccagaacagcaccaaggacaggaagatcatccctctcaaaatgtgctttgctgctagaaacctaagcatgccggatctggaaaacagattgatagagctacattctcctgatagcaggaacacgttgatcctacgctgcaaagatacagccacagcacactcctggttcgtagctatccacaccaacataatggctctcctcccacaggtgttggctgaactcaacgccatgcttggggcaaccagtacagcaggaggcagtaaagaggtgaagcatattgcctggctggcagaacaggcaaaactagatggtggaagacagcaatggagacctgtcctcatggctgtgactgagaaggatttgctgctctatgactgtatgccgtggacaagagatgcctgggcgtcaccatgccacagctacccacttgttgccaccaggttggttcattctggctccggatgtcgatccccctcccttggatctgaccttacatttgctaccaggacaggctctcgacagggcattgagatgcatctcttcagggtggagacacatcgggatctgtcatcctggaccaggatacttgttcagggttgccatgctgctgctgagctgatcaaggaagtctctctaggctgcatgttaaatggccaagaggtgaggcttactattcactatgaaaatgggttcaccatctcaagggaaaatggaggctccagcagcatattgtaccgctacccctttgaaaggctgaagatgtctgctgatgatggcatccgaaatctatacttggattttggtggtcccgagggagaactgaccatggacctgcactcttgtccgaagccgattgtatttgtgttgcacacgtttttatcggccaaagtcactcgtatgggactgcttgtatgagcaacaaaaaatcagaaaagagccttgactgtcacaagaaatatttccacctcaaaaaaaaaaaagcacaaaaagaaactctttgctctccttcagcacagtgccttcccaaggacctgcaaataactgctgaaccataaccgtgtttaaagaagagcctacctttcacagtctaccttggccagatattctagcactctaaaaggctccaaaatgaagctgttgatttattctcatttcaaaatatggtttatgagtaattaggtttatttctactgctaaaaagaatggctcattgttttctttttttttcattgttttcatttttagacataatcaaatacccaagcattgttttctttttcttctccctgtaggatttgtgttgtgcttagccttgatctcttgttcagaacaattgtcccttcccaggtgctagcttgcagcagcctgttgcttcctgagcattccagataggtcgtatgtcttggaatttactgtcctcactagctccttccaccataggaagtccttgaattgtatcaccaaagggttgttccatttgccctggatctccctctatctcagcctggccatcacttcccaccttatcccaagctttgccactgtctctaggacttagaacttgtaaatttgatttgccttgccttctacttcctttctagtggtgactgagttgaaaagcaagttggaagccactgcttttaaagaaaagttttgcttggtttaggtttttccaattttatttttgttaggagccaggggataagatttattttaaatgaaaatcctcttcctaggttaagccattttttttattgcttaccaaatgtgcctttggttagggttagtggagctttattagtcactatttgaataactggaaatcactgccatttccaggagatcacctatcctagttttgaggaatagtcattgaggtgggtttccttaatggcatctcttctagtaggcagatctgtttgaacaagataaatcctaaagagccagcctgcttgaggagtagacttggtgggtgaagccagcaattccgcacaaacgtcatgttgaattgttttgggctgcccaaaaacaacaggatgcagcatcctggctgtggcctggccctttgtggcagcagtggcatggacaagcaactgctaattcgagacttactattggcttcacagcacaccctacagtgagcagggtgatgagaccgtggaacagctacctgcttttggttaagattgccagatatcattaggacacagtagcagcaagaatgctgattttgtagtgttagaaaatgaactcagcttgtttttcctaattttgaaggtggtatatatctgcaaacatttaaaatggtataatatcatataaaatgtcaaaattagcacagtccctggatctcaaagaataggtaatattgacttggatgttctttatgctctctgaagaaaggtctagggaaagttcttgtttgcttgattgatcaagagtgccacggaagaatgtgagcgctgtggagggtggaggagggtgtcacttcagatggggcaggcacagggggagaaaagaagagaaaaacacacctgtgtgcaaaatgagctatttggtttcagtgcggcctgaccgatggggaggacccatgagcagagagagttctaggtcaacattgtaactccattgtcctccttcacccataagtcagtcctccttcctcattacagtgaaaccaacaatatgcagaggttggggagagatgcctgttcttcccccagcttcatataattgtcaaagttccaaaaatgaattatctgaactgcttaaaactggaaattaaaatctagacaagaatatgtctttcaagagctttttatgttttgaaagttcataaacctaagattggctccatctgagataaattttcttttctttttttttttgagacggagtctcgttctgtctcccaggctggagtgcagtggcatgatctcggctcactgcaacctccacctcctaggttcaagtgattctcctgagtagctggggttatagctacccaccaccacacccagctaatttttgtatttttagtagaggcaggttttcaccatgttggctaggctggtcttgaactcccgacctcaagtgatccacctgccttggcctcccaaagtgctgggattataggtgtgagcccccgtgcctggcccacaataaattttcatttcagagaaggaaaaaaatctcttgaacgtccagaaatgatttctggaatcagaatttcaatatgtaataccctcaggtaggcaatcttgaaccctctatgcagtgagagcattattaatatgagatgttgaatgatgcctttacagacttcagcagcaaagccatttggttgaggttttctgtgttaatgtgaaaagctaagccactgagatttgcaggggagcttctgagccaccctgcttgttggttatatgaggatgtaaaataggtggaattaaaatgtgagcaggaaaggcaaggcatgtgtgcattttcactcattttggtcaaggttaaactgacatgtatagcactgaggtctgtagggttcttaatatcttttgagtcttgctgtgaaatgaaagtgtgggaggtttcctttgtccattagcagccccaagaaccagaacccttttgctgcttttcttacatacctaacagctctccagtcatgatgaccaaggttgttcttcaatcaaatgtgtttgtgggattttcagtccgcaaatgaagtgctctctaatgaatgggacaccatgataaatatgtatttatatttagatgccaaagtatggcaaattatttccaaatgataactacaaatgggaattttcgatattctaccttttttatagaaccagctcacttttcatttctttttcattttgaattaagaaaattgttgaggatgtggtgggttccagtgtgtggaatggaaaggaaactgcagaatagtgtctgctccccattcagagggactgcttcctgtgccccccagacccggggcttcgacagcttctccacattccacacagatgcctaggagcagcgagttggtatatgaaaagtctcccaccttttctcctaaaacttctctcctttctctccataaaaagaaaaggaaaggaacaaaagaaaaacattcagtttttctttttctgaaaaaggtaagtcctttcctgaagtcatcaaatgaaacattatctggaaattagtttctaatgttgtatatgaagaaatacttaaatataagttcctgcagtatttattagatagttgtaactgtaaactcacctccctagtagataagagtttcaggttaaatactggaacatatataggcagtcaaaaatactactttaaatgtcattcacctattttaaagccatgttttagcactttttaggccaaagaaggtctgatagtgcctgtttttatgttctgtactctcacaaactttgttactcaaaattattgcatggcaggagagattggattatttatttcttatatttttataagtaaaaaaatctttctaaacaacaaatacctaacattattactgattgttttcctaatttatcctcctaagttgaatggtaacaaagcttttccagctgaatgaatgcacttagctgataaaccagaatttgttcttttttttccttcttttttttttgagacaggttctcactctgtcaccgaggttggagtgcagtggtatgatcatagctgactgcagcctcaaccttctgggctcaaatgatcctttcacctcagcctcctgagtagctgggaccacaggtgtgtgccaccacacctggctaatttttatggatttttttttcttttttttttttcgccatgttgcccaggctggtcttgaactcttggcactcaagcagtccttctgcctcagcctcccaaagtgctgggattacagatgtgagccactgcacctggccccagaaattatgcttaaaaaaaaaattaagctgtgtggaatctggacaaggctatgtttctcctagaaacaggttttgctgtaaatggttttgatgggcgaaagtgtgagaaaaggttataatagattcttttttttaattttgtgagaaattccaggtcttcttgcttaacttatatgcatgtggatatatttgttttcaaagccatggaagaatctctgttcatatattttaatgcaaattaccttgtatgctgctatgcaaattctattaaaaggcctacctgcttaagaattaaacatttttgaaactttcagggaagacctgtagactcaagcactttctctgcttttttgtatcttatcttggacacttatgctgaattatgttcttattattttcactggttataagctattccttgtacataatatttaaactatccaaatatccagcatacatttccatgtggctgccatcggctgttgatgccatgaatgaaatggctggttagaaagccaaaggtcttcttttttcaattcctaatgaataagtaaaatgccagatctctttggtctcaaagcaaattgctctgatcagatcaaatatctatgtaatgaaaagagacttacttaaatttgggattctgcttaaactttaagttgaatttgactgtagtcattcattctttttatatatctctgtcaggtatgacattaattaccaggtggtattatactctactttgagtttggacatcactttcagttaaatttctgttgttattgtggcttttttttttttttaaccccactgaagatggaagtagagcagtctgccatctcctgctgttctttctctgtgccccctaattgcttggtaatctaaaattattctgactttccacatactgtctttaaaaaccaattgtagcaatctgcccgcctccaccctttaagctaaatctttcactgtgctggatacatagacactcgataaatgtgtgatgatagttctaaaataattatgctatatatcagggttctgtatttttgagcaatatcattattcctatgctgtgatgttaaatggaatttattttacactagtaatagactgcttaagtggctgatttgaaacctttctctaaaaaaacaaaaacatctggcagatgagtgacacaaattcattctcttaaaggatagaatttcaagttaaggataaggcacaataaataggcacatagaggacatctgtttttgtttttggttttggttttgtttttttttgtctctctgactagctaaactgccaactagaagaatggttgttatgtagtaactcagaagaatcttttaataagtttcttcttttgtttcaaaacaaacttgagcttcatttcttgccacctctattctttcttcccacgttgggtgactgaactgatgcttattctagttttagaagaggatccacatttaatgtaaggcataaatatgccttttgcaaattattgcttgttctccagtgaacatttgatcatattcaacagaaatccaccatataaaccataatccttgaattgccccttttaaaatagattggttaaaaccaaaaacctataagagagaaatgatatttcattgtattgtaggtttgggaatcctggttagatttataatttctggccgggtgcggtggctcatgcctgtattcccagtactttgggagcccaaggtgggtggatcacctgaggtaaggagtttgagaccagcctggccaacatggtgaaaccccatctctactaaaaatacaaaaagttagctgggcatggtggtgcgcgcctgtggtcccagctactcgggaggctgaggtgggagaatcccttgaacccaggaggcagaagttgcagtgagctgagatcatgccattgcactccagcctgggcaacagagcgagacttcatctccaaaaaaagaaaaagaagaaaaagatttataatttctgagtcccctaagtccctttctcagtttgcaataatcttacgtccatgctattgacactaattttgaaactggaaagctaattaatgacatattcatgtgttctttcatctaataaacatttattaatgtatagttctacaccaggcattctgaagggtccaaaagaaagttcctgccctctagtagcacataatccgttatttctcagcacaccatgccatctgtttatcattcagcagttaagtaattcatcacttcatatttttaccaaagtatatttacaagtctgtttatctggatctggcaaactggaaaatgtttgaagggatactcaggctttgatccatgccaacatgaaaggactccaagcacatttaagtaggctggtcttttcatcatgcatgattttttttttagtgcaaatttagactttagtttgggaaagagaacagtatacagtatcctttgtaagataaatcacaacaacaaaaattaagttttattgcacaaagtagataaatgagaaagtctttcttaaaaaatgcttctttaactgtaacagcaaaactaaatgcatattttatcaaccccttatttctaattgctgtattcatttccacccttaaactatttaagcatttcatctgctgaaagtccttatatacatggtagacggaatatttctccattaatgatagatcaaaatgaagatatttaaaaattaacaaaatcaggccaaggcaggaggatcactttagcccaggaggtccagaccagcctgggcaacacagcgggaccccgactccatttaaaaaattaaaaaaaaaaaaaaaacttttaacatttaaaaaataaaaattaacaaaatttcacttattccaggacacgctggcatttggactcaatgaaaagggcacctaaagaaaataaggctgactgaatgttttccataattttcacacaataacagtccctttctatccagcttgccttccatttatctctagggttagcttttcaggcaacatccttggtcattgcccagaaagtacctgagctatcagtgattggaatggcacaggaaaccgaatcacatgggtgccctccccttggttttcaagtatcttggagttgtgcacaaaaattaggtcatgccttcagtgtcttgttctttaaacctaccctttgacaatcaggtgctaatgattgtatactattaaaaccagcacataagtattgtaaatgtgtgttcctcctaggttggaagaaatgtctttccttctatctgggtcctgttaaagcgggtgtcagttgtgtcttttcacctcgatttgtgaattaatagaattggggggagaggaaatgatgatgtcaattaagtttcaggtttggcatgatcatcattctcgatgatattctcactttgtcgcaaatctgcccttatcgtaagaacaagtttcagaattttccctccactatacgactccagtattatgtttacaatccattggatgagtgcagcattataagaccttggtgcccagaaaaatctgtcctttttggtaccaaacctgaggtcttttggaagataatgtagaaaaccactacctattgaaggcctgttttggctaatctgtgcaaactctgatgatacctgcttatgtggattcttttccacactgctttcatttttaagtataaagacttagaaaactagaataatgcttttacaaataattaaaagtatgtgatgttctgggttttttccttctttttagaaccctgtatttaaacaagccttctttttaagtcttgtttgaaatttaagtctcagatcttctggataccaaatcaaaaacccaacgcgtaaaacagggcagtatttgtgttcctaattttaaaaagctttatgtatactctataaatatagatgcataaacaacacttccccttgagtagcacatcaacatacagcattgtacattacaatgaaaatgtgtaacttaagggtattatatatataaatacatatatacctttgtaacctttatactgtaaataaaaaagttgctttagtca

SEQ ID NO: 316 - DNA, 2103 bp, Homo sapiens
aaaaaccatggatcctggaggtgcccgcgaacactgcttgtcgcctgggcaaccggagaggacgaagcaggacctaggtggcggcggtggtaccggctgcaatggtgtccaatcccgtgcatggcttgccctttcttccgggcacgtcctttaaggactctacgaaaacagccttccacagaagtcagacgctgagctacaggaacggctatgcaattgttcgacgtccaacagttgggataggcggagaccggctccagttcaaccagctgtcccaggctgagctggatgagttggccagtaaggcaccagtcttaacttatggccaacctaaacaagccccacctgcggattttattcctgcgcatgtggcctttgacaaaaaggtactgaaatttgatgcctatttccaagaagatgttcctatgtcaactgaggaacagtataggatccgtcaggtgaacatttactattatctagaagatgacagcatgtctgtcatagagcctgttgtagaaaattctggaatccttcaaggcaagttaataaaacgccagcggctagccaagaatgaccggggtgaccattaccattggaaagacctaaatcgaggaataaacatcacaatttatggcaaaactttccgcgttgttgactgtgaccaattcacacaggtatttttagaaagccaaggaattgagttaaatccaccagagaagatggctcttgatccttacactgaactccgaaaacagcctcttcgtaagtatgtcaccccatcagactttgatcaactcaagcaatttctcacctttgacaaacaggtccttcgattctatgcaatctgggatgatacagacagcatgtatggtgaatgtcggacctacatcattcattactatcttatggatgatacggtggaaattcgagaggtccacgaacggaatgatgggagagatcctttcccactcctaatgaaccgccagcgtgtgcccaaagttttggtggaaaatgcaaagaacttccctcagtgtgtgctagaaatctctgaccaagaagtgttggaatggtatactgctaaagacttcattgttgggaagtcactcactatccttgggagaactttcttcatttatgattgtgatccatttactcgacggtattacaaagagaagtttggaatcactgatttaccacgtattgatgtgagcaagcgggaaccacctccagtaaaacaggagttgcctccttataacggttttggactagtggaagattctgctcagaattgttttactctcattccaaaagctccaaaaaaagacgttattaaaatgctggtgaatgataacaaggtgcttcgttatttggctgtactggaatcccccatcccagaagacaaagaccgcagatttgtcttctcttactttctagctaccgacatgatcagtatctttgagcctcctgttcgcaattctggtatcattgggggcaagtaccttggcaggactaaagttgttaaaccatactctacagtggacaaccctgtctactatggccccagtgacttcttcattggtgctgtgattgaagtgtttggtcaccggttcatcatccttgatacagacgagtatgttttgaaatacatggagagcaacgctgcccagtattcaccagaagcactcgcgtcaattcagaaccatgtccgaaagcgagaagcgcctgctccagaagcagaaagcaagcaaactgaaaaggatccaggcgtgcaggaattggaagcattaatagacacaattcagaagcaactgaaagatcactcatgcaaagacaacattcgtgaggcatttcaaatttatgacaaggaagcttcaggatatgtggacagagacatgttctttaaaatctgtgaatcgcttaacgtcccagtggatgactccttggttaaggagttaatcaggatgtgctctcatggagaaggcaaaattaactactataactttgttcgtgctttctcaaactgacctgctgatgagaaaatgcaagacaatttttgatactggaactatgctttgaaatacaccttacactcttcatagtggc

SEQ ID NO: 317 - DNA, 4849 bp, Homo sapiens
taagggcgcgagggaagtggcgggcggggactaaggcggggcgtgcaggtagccggccggccgggggtcgcgggtatggccgaggccaggaagcggcgggagctacttcccctgatctaccaccatctgctgcgggctggctatgtgcgtgcggcgcgggaagtgaaggagcagagcggccagaagtgtttcctggctcagcccgtaacccttctggacatctatacacactggcaacaaacctcagagcttggtcggaagcggaaggcagaggaagatgcggcactgcaagctaagaaaacccgtgtgtcagaccccatcagcacctcggagagctcggaagaggaggaagaagcagaagccgaaaccgccaaagccaccccaagactagcatctaccaactcctcagtcctgggggcggacttgccatcaagcatgaaagaaaaagccaaggcagagacagagaaagctggcaagactgggaattccatgccacaccctgccactgggaagacggtggccaaccttctttctgggaagtctcccaggaagtcagcagagccctcagcaaatactacgttggtctcagaaactgaggaggagggcagcgtcccggcctttggagctgctgccaagcctgggatggtgtcagcgggccaggccgacagctccagcgaggacacctccagctccagtgatgagacagacgtggaggtaaaggcctctgaaaaaattctccaggtcagagctgcctcagcccctgccaaggggacccctgggaaaggggctaccccagcaccccctgggaaggcaggggctgtagcctcccagaccaaggcagggaagccagaggaggactcagagagcagcagcgaggagtcatctgacagtgaggaggagacgccagctgccaaggccctgcttcaggcgaaggcctcaggaaaaacctctcaggtcggagctgcctcagcccctgccaaggagtcccccaggaaaggagctgccccagcgccccctgggaagacagggcctgcagttgccaaggcccaggcggggaagcgggaggaggactcgcagagcagcagcgaggaatcggacagtgaggaggaggcgcctgctcaggcgaagccttcagggaaggccccccaggtcagagccgcctcggcccctgccaaggagtcccccaggaaaggggctgccccagcacctcctaggaaaacagggcctgcagccgcccaggtccaggtggggaagcaggaggaggactcaagaagcagcagcgaggagtcagacagtgacagagaggcactggcagccatgaatgcagctcaggtgaagcccttggggaaaagcccccaggtgaaacctgcctctaccatgggcatggggcccttggggaaaggcgccggcccagtgccacccgggaaggtggggcctgcaaccccctcagcccaggtggggaagtgggaggaggactcagagagcagtagtgaggagtcatcagacagcagtgatggagaggtgcccacagctgtggccccggctcaggaaaagtccttggggaacatcctccaggccaaacccacctccagtcctgccaaggggccccctcagaaggcagggcctgtagccgtccaggtcaaggctgaaaagcccatggacaactcggagagcagcgaggagtcatcggacagtgcggacagtgaggaggcaccagcagccatgactgcagctcaggcaaaaccagctctgaaaattcctcagaccaaggcctgcccaaagaaaaccaataccactgcatctgccaaggtcgcccctgtgcgagtgggcacccaagccccccggaaagcaggaactgcgacttctccagcaggctcatccccagctgtggctgggggcacccagagaccagcagaggattcttcaagcagtgaggaatcagatagtgaggaagagaagacaggtcttgcagtaaccgtgggacaggcaaagtctgtggggaaaggcctccaggtgaaagcagcctcagtgcctgtcaaggggtccttggggcaagggactgctccagtactccctgggaagacggggcctacagtcacccaggtgaaagctgaaaagcaggaagactctgagagcagtgaggaggaatcagacagtgaggaagcagctgcatctccagcacaggtgaaaacctcagtaaagaaaacccaggccaaagccaacccagctgccgccagagcaccttcagcaaaagggacaatttcagcccctggaaaagttgtcactgcagctgctcaagccaagcagaggtctccatccaaggtgaagccaccagtgagaaacccccagaacagtaccgtcttggcgaggggcccagcatctgtgccatctgtggggaaggccgtggctacagcagctcaggcccagacagggccagaggaggactcagggagcagtgaggaggagtcagacagtgaggaggaggcggagacgctggctcaggtgaagccttcagggaagacccaccagatcagagctgccttggctcctgccaaggagtcccccaggaaaggggctgccccaacacctcctgggaagacagggccttcggctgcccaggcagggaagcaggatgactcagggagcagcagcgaggaatcagacagtgatggggaggcaccggcagctgtgacctctgcccaggtgattaaaccccctctgatttttgtcgaccctaatcgtagtccagctggcccagctgctacacccgcacaagcccaggctgcaagcaccccgaggaaggcccgagcctcggagagcacagccaggagctcctcctccgagagcgaggatgaggacgtgatccccgctacacagtgcttgactcctggcatcagaaccaatgtggtgaccatgcccactgcccacccaagaatagcccccaaagccagcatggctggggccagcagcagcaaggagtccagtcggatatcagatggcaagaaacaggagggaccagccactcaggtgtcaaagaagaacccagcttccctcccactgacccaggctgccctgaaggtcctcgcccagaaagccagtgaggctcagcctcctgttgccaggacccagccttcaagtggggttgacagtgctgtgggaacactccctgcaacaagtccccagagcacctccgtccaggccaaagggaccaacaagctcagaaaacctaagcttcctgaggtccagcaggccaccaaagcccctgagagctcagatgacagtgaggacagcagcgacagttcttcagggagtgaggaagatggtgaagggccccagggggccaagtcagcccacacgctgggtcccaccccctccaggacagagaccctggtggaggagaccgcagcagagtccagcgaggatgatgtggtggcgccatcccagtctctcctctcaggttatatgacccctggactaaccccagccaattcccaggcctcaaaagccactcccaagctagactccagcccctcagtttcctctactctggccgccaaagatgacccagatggcaagcaggaggcaaagccccaacaggcagcaggcatgttgtcccctaaaacaggtggaaaagaggctgcttcaggcaccacacctcagaagtcccggaagcccaagaaaggggctgggaacccccaagcctcaaccctggcgctgcaaagcaacatcacccagtgcctcctgggccaaccctggcccctgaatgaggcccaggtgcaggcctcagtggtgaaggtcctgactgagctgctggaacaggaaagaaagaaggtggtggacaccaccaaggagagcagcaggaagggctgggagagccgcaagcggaagctatcgggagaccagccagctgccaggacccccaggagcaagaagaagaagaagctgggggccggggaaggtggggaggcctctgtttccccagaaaagacctccacgacttccaaggggaaagcaaagagagacaaagcaagtggtgatgtcaaggagaagaaagggaaggggtctcttggctcccaaggggccaaggacgagccagaagaggagcttcagaaggggatggggacggttgaaggtggagatcaaagcaacccaaagagcaagaaggagaagaagaaatccgacaagagaaaaaaagacaaagaaaaaaaagaaaagaagaagaaagcaaaaaaggcctcaaccaaagattctgagtcaccgtcccagaagaaaaagaagaaaaagaagaagacagcagagcagactgtatgacgagcaccagcaccaggcacagggatttcctagccgagcagtggccatccccatgcctctgacctccaccgacctctgcccaccatgggttggaactaaactgttaccttccctcgctccacagaagaagacagccagcttcaggggtccctgtgctggccaagccagtgagcctgcggggaggctggtccaaggagaaagtggaccagctcccatgacctcaccccactcccccaacacaggacgcttcatatagatgtgtacagtatatgtatttttttaagtgacctcctctccttccacagaccccacatgcccaaaggcctcgggacttcccaccaccttgctccacagatccagctaggcctgacctgtgcctcatcccgtgccgctcggtctctggctgatcccgaggctttgtcttcctctcgtcagttcttttggttgtgttttttgttttttttttaataactcaaaaaaaaaataaaagacttggaggaagggtgcaagctcccagtgcaaaaaaaaaaaaaaaaaa

SEQ ID NO: 318 - DNA, 1317 bp, Homo sapiens
agctcccgcgcgctagagccgcctgctggtctcacccagccgggaccgctgacctggcgctttgtgcggctccaggcctccgagtggactccagaaagcctgaaaagctatcatggcagcaaggcccaagctccactatcccaacggaagaggccggatggagtccgtgagatgggttttagctgccgccggagtcgagtttgatgaagaatttctggaaacaaaagaacagttgtacaagttgcaggatggtaaccacctgctgttccaacaagtgcccatggttgaaattgacgggatgaagttggtacagacccgaagcattctccactacatagcagacaagcacaatctctttggcaagaacctcaaggagagaaccctgattgacatgtacgtggaggggacactggatctgctggaactgcttatcatgcatcctttcttaaaaccagatgatcagcaaaaggaagtggttaacatggcccagaaggctataattagatactttcctgtgtttgaaaagattttaaggggtcacggacaaagctttcttgttggtaatcagctgagccttgcagatgtgattttactccaaaccattttagctctagaagagaaaattcctaatatcctgtctgcatttcctttcctccaggaatacacagtgaaactaagtaatatccctacaattaagagattccttgaacctggcagcaagaagaagcctccccctgatgaaatttatgtgagaaccgtctacaacatctttaggccataaaacaacacatccatgtgtgagtgacagtgtgttcctagagatggtattgtctacagtcatgtcttaatggatcccagctctgtcatggtgctatctatgtattaagttgggtcctaagttgggtcttttgtgtcaacgagatcatctcttctagaaatatcaaccttttttgtccagtaaataattgttaggggatctttattggaaaacttttttggagaggctggtatttaagttagatctgattgggctactcatgtcctgtagccagttcatcctcataataagaatgggcaggatctcttgttctctcctgagtgtctttctactctcctgagcgtctttctgctctccttatcctgttctcttatccttatcccctccagtctctgcctaatttttagtgtttaataacaaccgaatgtctagtaaatgactctcctctgagctgtaataaataaaatggtagtaatgaatgcaatcagtattagccaaaataaagaatttatgagtcattaaaaaaaaaaaaaaaaaaa

SEQ ID NO: 319 - DNA, 6850 bp, Homo sapiens
gctctgccaggagcagtcgcctcctccttggcaaatagtcctcggcagggtccgagttcttggataattcgagagaaaaggcacgataagttgcagtacgaggacacggaaacgaccaggagaggaggacagggagcgaagtttcctcaatagtgtgtgaagttagttaaaaactccctccttcctcaggatccctccgcctgcggtagcggtggtgaggccgagggagccgccattttggatgttcggttcctgctgccactgctgccgccgcccccggagctgctggtttcattcgaggtttcgggccgaggatgccagcccccatcagattgcgggagctgatccggaccatccggacagcccgaacccaagctgaagaacgagaaatgatccagaaagaatgtgctgcaatccggtcatcttttagagaagaagacaatacataccgatgtcggaatgtggcaaaattactgtatatgcacatgctgggctaccctgctcactttggacagttggagtgcctcaagcttattgcctctcaaaaatttacagacaaacgcattggctatttaggggcaatgctgctgttagatgaaagacaagatgtccatcttctcatgaccaactgtatcaagaatgatcttaatcatagcacgcaattcgtacaggggttagcactttgtaccctcggctgcatgggctcctcagagatgtgcagagatcttgcaggagaggtagagaagctcctgaaaacctccaactcttacttaagaaaaaaggcagcactgtgtgctgttcatgtcatcaggaaagttcctgaacttatggagatgtttttaccagcaacaaaaaatttattgaatgagaagaaccatggtgtcctccacacatctgtagtcctcctcacagaaatgtgtgagcgaagcccagacatgcttgcgcatttcagaaagaatgaaaagcttgtgccccaattagttcgtattttaaagaacctcatcatgtccggatattcaccagaacatgatgtttctggtatcagtgacccctttttgcaggtacgaattttgcggttattaagaattttaggacgaaatgatgatgattcaagtgaagctatgaatgatatattagcacaggttgccactaatactgagactagtaaaaatgtaggaaatgctattctttatgaaacggttttgactatcatggatattaagtcagagagtggattgcgagtcctagccataaatatcctgggtcgtttcttattgaacaatgacaagaatattagatatgtggctctgacatctttgttgaagactgtacagacagatcataatgcagtacagaggcacagaagcacaattgtggactgtcttaaagatttggatgtctcaataaaacggcgtgcaatggaattgagttttgccctggtaaatgggaataatatccgaggcatgatgaaagaattactttattttctggattcgtgtgagccagaatttaaagcagactgtgcatctggaatctttcttgctgcagaaaagtatgcaccttccaaacgatggcatatagacacaattatgcgtgttttgacaacggcaggaagttatgttcgtgatgatgcagtccccaatttaatccagttaataactaatagtgtggagatgcatgcctatactgtccagcgcctgtacaaagcaattcttggtgattattctcaacaacctttggtacaagtggctgcatggtgtataggtgaatatggtgatcttcttgtatctggccagtgtgaagaggaagagcctattcaggtaacagaggatgaagtgttggatattttagaaagtgtcctaatctctaatatgtccacctctgtgacacgaggttatgccctcactgccattatgaagctttccactcgattcacttgtactgtaaaccgaattaagaaagtggtttccatctacggaagcagcattgatgtggaactccagcagagggcagtagaatataatgcacttttcaagaaatatgaccacatgaggtctgccctacttgagagaatgcctgtcatggaaaaagtgaccacaaatggccctactgagattgtgcagacaaatggagagacagaaccagctccactagagaccaaaccgccaccctctgggccacagcccaccagccaggccaatgatttattggatttgttgggaggaaatgacataacacctgttattccaactgcgcctacaagcaaaccatcttctgctggtggagaacttcttgatttgctgggagacatcaaccttacaggtgctccagctgctgctcctgcccctgcctcagtcccacagatatcccagccccccttcttgttggatgggctttcatcacagcctctcttcaatgatattgctgcaggcatcccctccatcacagcatacagtaagaatggcttgaagatagaattcacctttgaacggtcaaataccaaccccagtgtaacagtgataacgatacaggcctccaacagcacagagctagatatgacggactttgttttccaagctgcagtaccaaagacattccagctgcagctcttgtctcctagcagcagcattgtcccagcatttaacacggggaccatcacacaagtcattaaagttctgaaccctcagaagcaacagctgcgaatgcggatcaagcttacatataatcacaagggctcagcaatgcaagatctagcagaggtgaacaactttccccctcagtcctggcaatgagggtttggcaccattctcattctttatcccactcaatcaaaggaactctgggaaggaggttgtgattgctggcaagtcccccccaactgtaccacgggcatgaggagctgaagagaactgctgaggaggattttcctaaagttactgctgaccttgaagcattgttaaagactaatgtcctctcctccactgttgaggctggctgcttctggaggctactttgcactcttcctcttctcctttttccgcacttctccacccctcccacatttacagccagaatcaacattccctgggcccctgaggaaataagcagctggtctggaggagaggactgcaatccatggcgaaaaaacactcactttgtctctgcagcaaagagttgccccttctttctactgttgtttctctgtggactgggcaaggtggggtatttattcctcactagctgggttaccatcttcaggcacttttaacatctggcattcggaatggaaatgtaataatggacattagggagccctgcctttttctactggttcccccaatgtttgaaagaggcattaggctcctggtagccttttctgtgcattgctgtatacacacagacacacacatgtatgtttgttaccaagaactggtcagaccttgcgagtttatttgtaaacactggacagatggagttaaaaagagcttttgttgagatttggcatgaaggatatggtgctctatttgtaatagaaacttccaaggctcttccagctcccctttctcgccattctttagctgtagtcatgaatagtctccatgattttcaaaattgattccctttaaagtgcaaaatggtcaccttctaaaagatatattcatagttattaatgaccctattcccaccacaaattttaaagtgctcctaagcccataacttgcctgtttgaactatggtaatgggtggaagaggagttcaccagtttcaaagatcagactctgtatcaaaagtacctttgcccttaggaagagtgagtattggagtcatcttatctattactccaaacctccctttttatttcttgagcctggcttggaccttggcattccgtttgaattccttctaactggaacatttgtgttgtatctgtaacactggcactgaaataaagaccacacggttaaagaaatctttccatattgtactttatggtgttggagtgaagccttgtagcttccatacccctatgtcagaggaggtcttacggacaccatagggtaggaatagcctttcctcagtctgagaaattggtctcttttaaaagacgaatctcatgaatattcacatcaaagacttgagctttttaaactagtgagagtgccaagtgctttttagaaaggacccatatgttatcaaactttgaaattgagttgctggaatgaagtagaggtgactctctctgtggtacacattgaatgtactatgtatgttcaagtattcaggcgccatgtcttatatactgaagaaagaaaaagtgaggcccaccttgctcttacaatgtttgcaattgttactgtattgaatacagtataatgactactatggcttcaatcttaaacctggaaacaaatatccctttttttccccttcatttcaccaagcctttacttaaaatcttcagtgtcttgtcaaatctagctctgtatcagatgctggaatattcctaacatttgacaaactggagttgaactaaaggctccacgggaaagtttctggtcttactagtgtgtatgagcaagatctgctaaaacttactccactgggtaaatggttgactgagtcaagaacaggataatatctcctgcatagttttcagtaatgtaagtgtggactagtgcatatttcagacaactgctctgcctgtgcaatgaaaaatagcctttaagggtttctttgcagactgatttcattggatggatacttaatgctgtgaaacatgataggattaacataatgttggtggatttcttgaatagaatttgtcttaacattcctctttgtgtagaggctttattttctctcttatatttgtagctaaccagctcaggtttttttatttgaactgggttgaatctctgaagaaatctgttcaagaccatgctataagacactgtcagctaatggagctgggaagggtctactctgctgacagagcatttccttgggtgatcatagtttcgaggtagagtttatgatcattcatagctttgtctagaaggagtaaaatatcatggccttaacacaaagggtgctgcgtagaatatgaattgattttggaatcagaacacaagcaccatactgaaggactagcagccaaataactgcctaggatactgatggttgtgaagactgtttcaaatgattggatctttgaaagcttcagcgtgccttagtttctaggatcagaattagttttcctctcacttggccttgcagctaaatggagaaatgtttcaatttctttgaatacttgcacatttcaataattcctttcccgagtataaccactcaagggggagcaaatttggatggatttacgacttcacaggcattgtgaggaaagagcattttccaaggctgttttgataaccctggggtgataagcagtgagccctcacacacttactttgacaatttcacatgcacttgtacttcattatttccctcttcaagagtcgtttctattctagtttctgccccatcccggggaatcctaaaggagaattaattcatctaagtaatctcaaaaaactgtaggaagggtgctctccctgagaagcttctcccacagtgctttggtgctgttaccttgaggtggtttggacagtcacggaagttttaggctgtgcatagtgatcatctgttaattttaaggtctttatcatttaaagaaacattcctcagtgtaacatttgggaggggattctttcctcttgctagtttaaaggtgtgatttgtactccttgtttgtcccattcatatatgaaaatagacttttaaaactgtccaacactaatggtttatataacatgcttcccattttttttatgtcgtagaaattggaagttagggagtactgctttcaaggttcaacttcattatcttctgcattggaaaatatttgggccatgagaactaggggaaaggagtttgaatgtgtctatttttttctagtgaatgtattttaaccacagtgtcctaaactgagaaaactagagaggaaaaagtgggtgttcatgaactttgtagttgggagagtggttttacatgtctgtgtattcatgactttgggagtgggtaggatcattggagagagaattgcacagaaagtcctgaagtttaaaacacttttgaccagctttggctcgggagagtggggctgcttgtagaactggaagtgaataactttttcaagcaatatcagtgagtgggtcccatcgacagggttccaggacctggaacactttaacagaaggaaatgccgaagcagcttgcacagttgctttacagacttccaagaggctgattctggcttcaagatggagccttggagttggtttttttttttttttttttcttccctcaaagaacctgcggttgcgctttgtgtgttttgtttttgttttccatttgggggccccatgggaaagagcttctgaactctttcctttatgaactcccactgtgttcctataaaggcccttttctttcttagtgttgtaagttacattttcattatgccccatcacatcttctttactgtaaaaatattaaaaagctgtttccaagtgggacagctaatgaagctctaattattgcagacatatttttgagatgtaaaaaaaaaaatttaaagttaaatgataagtcttagaggcgagtgaggaataaaatggatgtaaacatttacatgggatgcattagaattctgctgtgtgtactgtcttttggttgaaacaaattatgaacagtgactaataataaaaagtcaatacccaatgatttaaaa

SEQ ID NO: 320 - DNA, 2530 bp, Homo sapiens
ctaaagtggagcccagcggcgggtgtgagagtccgtaaggagcagcttccaggatcctgagatccggagcagccggggtcggagcggctcctcaagagttactgatctatgaaatggcagagaatggaaaaaattgtgaccagagacgtgtagcaatgaacaaggaacatcataatggaaatttcacagacccctcttcagtgaatgaaaagaagaggagggagcgggaagaaaggcagaatattgtcctgtggagacagccgctcattaccttgcagtatttttctctggaaatccttgtaatcttgaaggaatggacctcaaaattatggcatcgtcaaagcattgtggtgtcttttttactgctgcttgctgtgcttatagctacgtattatgttgaaggagtgcatcaacagtatgtgcaacgtatagagaaacagtttcttttgtatgcctactggataggcttaggaattttgtcttctgttgggcttggaacagggctgcacacctttctgctttatctgggtccacatatagcctcagttacattagctgcttatgaatgcaattcagttaattttcccgaaccaccctatcctgatcagattatttgtccagatgaagagggcactgaaggaaccatttctttgtggagtatcatctcaaaagttaggattgaagcctgcatgtggggtatcggtacagcaatcggagagctgcctccatatttcatggccagagcagctcgcctctcaggtgctgaaccagatgatgaagagtatcaggaatttgaagagatgctggaacatgcagagtctgcacaagactttgcctcccgggccaaactggcagttcaaaaactagtacagaaagttggattttttggaattttggcctgtgcttcaattccaaatcctttatttgatctggctggaataacgtgtggacactttctggtacctttttggaccttctttggtgcaaccctaattggaaaagcaataataaaaatgcatatccagaaaatttttgttataataacattcagcaagcacatagtggagcaaatggtggctttcattggtgctgtccccggcataggtccatctctgcagaagccatttcaggagtacctggaggctcaacggcagaagcttcaccacaaaagcgaaatgggcacaccacagggagaaaactggttgtcctggatgtttgaaaagttggtcgttgtcatggtgtgttacttcatcctatctatcattaactccatggcacaaagttatgccaaacgaatccagcagcggttgaactcagaggagaaaactaaataagtagagaaagttttaaactgcagaaattggagtggatgggttctgccttaaattgggaggactccaagccgggaaggaaaattcccttttccaacctgtatcaatttttacaacttttttcctgaaagcagtttagtccatactttgcactgacatactttttccttctgtgctaaggtaaggtatccaccctcgatgcaatccaccttgtgttttcttagggtggaatgtgatgttcagcagcaaacttgcaacagactggccttctgtttgttactttcaaaaggcccacatgatacaattagagaattcccaccgcacaaaaaaagttcctaagtatgttaaatatgtcaagctttttaggcttgtcacaaatgattgctttgttttcctaagtcatcaaaatgtatataaattatctagattggataacagtcttgcatgtttatcatgttacaatttaatattccatcctgcccaacccttcctctcccatcctcaaaaaagggccattttatgatgcattgcacaccctctggggaaattgatctttaaattttgagacagtataaggaaaatctggttggtgtcttacaagtgagctgacaccattttttattctgtgtatttagaatgaagtcttgaaaaaaactttataaagacatctttaatcattccaaaattgtgtccgttttcttgagcgttttgattttttacttttagcttataccagctgaatggcagccttgcctaatccacctacaacaagaatttcttaagctttcttttatttgcatgagagagccactaccaaggcatgttttgttatgctgaaactgggctgctgcatactgctaaatggcacctctgggattggcctacctggggatttcttggtttgtgaaaacaggagaggagaaatatctcatacaagtgaaaggatactggagagagaaattacccatttctaaaaaaaaaccacactctgtcgtatctgtgttaatgttttctagcatgtactctggtttcaacagacacaaatttatatgttaacccagttttcttgccgttctgtaagtgttttattcttagtgtgatttttttccattgggatgtttttgattgaacttgttcattttgttttgcttgggaggaaaataaacaattttacttttttccttaaaaaaaaaaaaaaa

SEQ ID NO: 321 - DNA, 10434 bp, Homo sapiens; identical to SEQ ID NO: 234

SEQ ID NO: 322 - DNA, 2546 bp, Homo sapiens
cagcggcggcccaggaggcagccggtgagcgcctgcgagcagagtggcgggggccgctgacaggtcccgcgcagcccagcccagcccagccacgcggctcacaggtggggtccaagagcagtttggagcaacccggcgctacggagaggggtggacggctctgcacgggcctcctgtctcccgctcgggcagagggactcggggggacctcgctccttggccgagagaacctgaactcgggcggagagaacgcgcccaggcgggcaaggggaccagagaaagccggggctggaagtcactgtcgctcgccactgtctggagcgcacggagcgcagaggcccggcagccgcgcgtgccctcccggggaccgagccagtgatgcaggatcgctgagcggagatccgcgccgagaagtctctcggggccggggctgagacgcacgccttcgacaccgctgccaagaccccgattccggcgactcttgcggggaaccgaggggccaaggctgccccaagctcaggacttgggcgagtctaagacgatggtttcttaagcacggacccgcgttccccttcccgccccctcgactggaggcagggatcctgcgcggggcccccgggattccgtttccccgcggagccccggccgctgcctcccgggacagttcgcacggccacaggggcgcacggcgatgtggcctccgtccagcgcgctggcccgccggggggatgctctggcacctgtcggggtccaggcctagcatggccggcgcgttgcccgacgtcgcctccggctaggatggcccctccgggcccggccagtgccctctccacctcggccgagccgctgtcccgcagcatcttccggaagttcttgctgatgctctgctccctgctcacgtccctttacgtcttctactgcctggccgagcgctgccagaccctgtccggccccgtcgtggggctgtccggcggcggcgaggaggcgggggcccctggtggcggcgtcctggccggaggcccgagggagctggcggtgtggccggcggcggcacagagaaagcgcctcctgcaactgccgcagtggcggaggcgccggccgcccgcgccccgcgacgacggcgaggaggcggcctgggaagaagagtcccctggcctgtcagggggtccgggcggctccggggccggaagcaccgtggccgaggccccgccggggaccctggcgctgctcctggacgaaggcagcaagcagctgccgcaggccatcatcatcggagtgaagaagggcggcacgcgggcgctgctggagttcctgcgcgtgcaccccgacgtgcgcgccgtgggcgccgagccccacttcttcgaccgcagctacgacaagggcctcgcctggtaccgggacctgatgcccagaaccctggacgggcagatcaccatggagaagacgcccagttacttcgtcacgcgggaggcccccgcgcgcatctcggccatgtccaaggacaccaagctcatcgtggtggtgcgggacccggtgaccagggccatctcggactacacgcagacgctgtccaagcggcccgacatccccaccttcgagagcttgacgttcaaaaacaggacagcgggcctcatcgacacgtcgtggagcgccatccagatcggcatctacgccaagcacctggagcactggctgcgccacttccccatccgccagatgctcttcgtgagcggcgagcggctcatcagcgacccggccggggagctgggccgcgtgcaagacttcctgggcctcaagaggatcatcacggacaagcacttctacttcaacaagaccaagggcttcccctgcctgaagaaggcggagggcagcagccggccccattgcctgggcaagaccaagggcaggacccatcctgagatcgaccgcgaggtggtgcgcaggctgcgcgagttctaccggcctttcaacctcaagttctaccagatgaccgggcacgactttggctgggatggataaccatataatttaaaaagaaaaaaaaaatcaaaatataatatatttttttaccaatcggtagagaagagacagtttaatatttgtgctgaaaatatgtttcagtatttttttcaatgaatgttaagagattgttctcactcccgccccatcttaatgtataaccaacaccaaacacgtggatcaacagaaaaggaaaatttcactcgtctaaacactttcaattttcagtttttattttatgttctatatacccagtcataaagtataagcatcagttgtcattaaaagttttcagaaaatcttgaggttaaacatctctctctctttttttaaaatacaaggccctgataaaattgatatctatccttatatttttctccctttttcccgtgccactttttcttaaattatttcccagttagtattatcatatgtttgtacccgtcacagttttcatagtgctttcaaatacacctttttgatcattaaaataaaaaaataaatcttggaaaaaaaaaaaaaaaaaa

SEQ ID NO: 323 - skipped

SEQ ID NO: 324 - DNA, 2939 bp, Homo sapiens
agcaagaacgccagggacggggtctccgcgcctgcgcagtgaagctgggcgccttcggggcttgagcttctgagggtcgggtccagcgcgtgggctgctggatggcggaaccccaggcggagtcggagcccctgctgggcggggcccgcggcggtggcggcgactggccggcggggctgaccacttaccgcagcatccaagtcggccctggtgccgcggccaggtgggacctctgcattgatcaggctgtggtcttcatcgaagatgctattcagtaccgctccatcaaccaccgggtggatgccagctcgatgtggctttaccgacggtattactcgaacgtatgccaacggactttgagcttcaccatcttcttgatcctgtttttggcttttatcgagaccccatcctcactcaccagcacggcggacgtgcgctaccgcgctgccccctgggagccgccctgcggcctgaccgagagtgtcgaggtgctctgcctgctggtctttgcggccgacctctctgtgaagggttacctgttcgggtgggcccatttccagaaaaacctttggctgctgggctacctcgtggtgctggtggtgtctctggtggactggaccgtgtccctgagtctcgtgtgtcatgagcccctgcggatccgccggcttctccgtcccttcttcctgctgcagaactcctctatgatgaagaagaccttgaaatgcatccgctggtcgctgccggaaatggccagcgtcgggctgctgctggccatccacctgtgcctcttcaccatgttcggaatgctgctgttcgctggtgggaagcaggatgatgggcaggacagggagaggctgacctacttccagaacctgcctgagtctctgacttccctcctggtgctgctgaccacggccaacaaccccgatgtgatgattcctgcgtattccaagaaccgggcctatgccatcttcttcatagtcttcactgtgataggaagcctgtttctgatgaacctgctgacagccatcatctacagtcagttccggggctacctgatgaaatctctccagacctcgctgtttcggaggcggctgggaacccgggctgcctttgaagtcctatcctccatggtgggggagggaggagccttccctcaggcagttggggtgaagccccagaacttgctgcaggtgcttcagaaggtccagctggacagctcccacaaacaggccatgatggagaaggtgcgttcctacggcagtgttctgctgtcagctgaggagtttcagaagctcttcaacgagcttgacagaagtgtggttaaagagcacccgccgaggcccgagtaccagtctccgtttctgcagagcgcccagttcctcttcggccactactactttgactacctggggaacctcatcgccctggcaaacctggtgtccatttgcgtgttcctggtgctggatgcagatgtgctgcctgctgagcgtgatgacttcatcctggggattctcaactgcgtcttcattgtgtactacctgttggagatgctgctcaaggtctttgccctgggcctgcgagggtacctgtcctaccccagcaacgtgtttgacgggctcctcaccgttgtcctgctggttttggagatctcaactctggctgtgtaccgattgccacacccaggctggaggccggagatggtgggcctgctgtcgctgtgggacatgacccgcatgctgaacatgctcatcgtgttccgcttcctgcgtatcatccccagcatgaagccgatggccgtggtggccagtaccgtcctgggcctggtgcagaacatgcgtgcttttggcgggatcctggtggtggtctactacgtatttgccatcattgggatcaacttgtttagaggcgtcattgtggctcttcctggaaacagcagcctggcccctgccaatggctcggcgccctgtgggagcttcgagcagctggagtactgggccaacaacttcgatgactttgcggctgccctggtcactctgtggaacttgatggtggtgaacaactggcaggtgtttctggatgcatatcggcgctactcaggcccgtggtccaagatctattttgtattgtggtggctggtgtcgtctgtcatctgggtcaacctgtttctggccctgattctggagaacttccttcacaagtgggacccccgcagccacctgcagccccttgctgggaccccagaggccacctaccagatgactgtggagctcctgttcagggatattctggaggagcccgaggaggatgagctcacagagaggctgagccagcacccgcacctgtggctgtgcaggtgacgtccgggctgccgtcccagcaggggcggcaggagagagaggctggcctacacaggtgcccgtcatggaagaggcggccatgctgtggccagccaggcaggaagagacctttcctctgacggaccactaagctggggacaggaaccaagtcctttgcgtgtggcccaacaaccgtctacagaacagctgctggtgcttcagggaggcgccgtgccctccgctttcttttatagctgcttcagtgagaattccctcgtcgactccacagggacctttcagacaaaaatgcaagaagcagcggcctcccctgtcccctgcagcttccgtggtgcctttgctgccggcagcccttggggaccacaggcctgaccagggcctgcacaggttaaccgtcagacttccggggcattcaggtggggatgctggtggtttgacatggagagaaccttgactgtgttttattatttcatggcttgtatgagtgtgactgggtgtgtttctttagggttctgattgccagttattttcatcaataagtcttgcaaagaatgggattgtcattcttcacttcgaaaaaaa

SEQ ID NO: 325 - DNA, 822 bp, Homo sapiens
ttccctttgcaattgccttgggtcctgccgcacagagcggcctgtctttatcagaggtccctctgccagggggagggccccagagaaaaccagaaagagggtgagagactgaggaagataaagcgtcccagggcctcctacaccagcgcctgagcaggaagggggaggggccatgactacgaggccctgggaggtcactttagggagggctgtcctgaaacctggagcctggagcagaaagtgaaaccctggtgctccagacaaagatcttagtcgggactagccggccaaggatgaagcctcacttcagaaacacagtggagcgaatgtatcgagacacattctcctacaacttttataatagacccatcctttctcgtcggaataccgtctggctgtgctacgaagtgaaaacaaagggtccctcaaggccccgtttggacgcaaagatctttcgaggccaggtgcccaggtctttcatcagagccccatttcaagtgctcagtagcccctttggccagtgcgccccaccacatgggacagcgcaggtccagtggcctccccagctgaccgcaggcagggaacaaggcagaccctagagggccaggccacagcaggggctgaggatgcctggtgaatggatgcctgggagaatggatgccagaattcacgcatgaggctctgaacagggctgggaaaacttccaaacgaagggaagctcatgtcttggtgcactttgtgatgatgcttcaacagcaggactgagatggggacatttacaataaacagaaatgtatgggctcgaaaaaaaaaaaaaaaaaa

SEQ ID NO: 326 - DNA, 4834 bp, Homo sapiens
gagccccgcatcccgccgcagctgccgcctcgccgcggccgggccggagagcacggcggcgggagcgcggccttaggaggcggccggagcggtgggcacagctcggcgcggagcgtcctgtcaggcggcggccgagggcgtcgcggactctccccgcgatgatgccgatgatattaactgttttcttgagcaacaatgaacagattttaacagaagttcctataacaccggaaacaacctgtcgagatgttgtagaattttgcaaggaacctggagaaggcagctgccatttagctgaagtgtggaggggaaatgaacgtcccataccctttgatcatatgatgtacgaacatcttcagatatggggtccacggagggaagaagtgaaatttttccttcgacacgaggactccccaactgagaacagtgaacaaggtggccgtcagacccaagagcaacgaactcagagaaatgtaataaatgtacctggagataaacgtactgaatatggggttgggaatccacgtgttgaacttaccctctcagagctccaagatatggcagctaggcaacagcagcagattgaaaatcagcagcagatgttggttgccaaggaacagcgtttacattttctaaagcaacaggagcgccgtcagcagcagtctatttctgaaaatgaaaagcttcagaaattgaaagaacgagttgaagcccaggagaacaagctgaagaaaattcgtgcaatgagaggacaagtcgactacagcaaaatcatgaacggcaatctgtctgctgaaatagaaaggttcagtgccatgttccaggaaaagaagcaggaagtacagactgcaattttaagggttgatcagcttagtcagcaattggaagatttaaagaaaggaaaactgaatgggttccagtcttacaatggcaaattgacgggaccagcggcggtggagttaaaaagactgtaccaagaactacagattcgtaaccaacttaaccaggaacaaaattcaaaacttcagcagcagaaggaactcttaaataagcgcaacatggaggtggccatgatggacaagcgaatcagtgaactgcgtgaacgtctctatgggaaaaaaattcagctgaaccgtgtgaatggcacgtcatcaccacagtcccctctgagcacatcgggcagggtcgctgctgtggggccttatatccaggttcccagtgccggaagctttcctgtgctgggggaccctataaagccccagtctctcagtattgcctcaaatgctgctcatggaagatccaaatccgctaatgatggaaactggccaacattaaaacagaattctagctcttccgtgaaaccagtgcaggtggccggtgcagactggaaggatccgagcgtggaggggtctgtcaagcagggcactgtctccagccagcctgtgcccttctcagcactgggacccacggagaagccgggcatcgagattggtaaagtgccacctcccatcccgggtgtaggcaagcagctgcctccaagctatgggacatacccaagtcctacacctctgggtcctgggtcgacaagctccctggaaaggaggaaggaaggcagcttgcccaggcccagtgcaggcctgccaagtcgacagaggcccaccctgctgcccgccacaggcagcaccccccagccaggctcctcacaacagattcagcagaggatttccgtaccgccaagtcccacgtacccgccagcgggaccacctgcatttccagctggggacagcaagcctgaactcccactgacagtggccattaggcctttcctggctgataaagggtcaaggccacagtctcccaggaaaggaccccagacagtgaattcaagttccatatactccatgtacctccagcaagccacaccacctaagaattaccagccggcagcacacagcgccttaaataagtcagttaaagcagtgtatggtaagcccgttttaccttcgggttcaacctctccatcgccgctgccgtttcttcacgggtcactgtccacgggcacaccacagcctcagccaccttcagaaagtactgagaaagagcctgagcaggatggccccgccgcccccgcagatggcagcaccgtggagagcctgccacggccactcagccccaccaagctcacgcccatcgtgcattcgccactgcgctaccagagtgatgcagacctggaggccctccgcaggaagctggccaacgcgccccggcccctgaaaaagcgcagctccatcacagagcccgagggccccggcgggcccaacatccagaagctgctgtaccagcgcttcaacaccctggccggtggcatggagggcacccctttctaccagcccagcccctcccaggacttcatgggcaccttggccgatgtggacaatggaaacaccaatgccaatggaaacctggaagagctcccccctgcccagcccacagccccactccccgctgagcctgccccgtcatcagatgccaatgataatgagttaccttcccccgaaccagaggagctcatctgtccccaaaccacccaccaaactgccgagccggcagaggacaataacaacaacgtggccacggtccccaccacggagcagatcccgagtcctgtggctgaggccccatctccaggggaagagcaggtccctccagcacctcttccccctgccagccaccctcctgccacctccacgaacaagcggaccaacttgaagaagcccaactcggagcggacggggcacgggctgagagtccggtttaaccccctggcactgctcctagacgcgtctctggaaggagagttcgatctggtgcagaggatcatctatgaggtggaagatcccagcaagcccaacgatgaagggatcaccccactgcacaacgccgtctgcgccggccaccatcacatcgtgaagttcctgctggattttggtgtcaacgtgaatgctgctgatagtgatggatggacgccgctgcactgcgctgcctcttgtaacagcgttcacctctgcaaacagctggtggagagtggtgccgccatttttgcctcaaccataagcgacattgaaactgctgcagacaagtgtgaggagatggaggaaggctacatccagtgctcccagtttctatatggggtgcaggaaaagctgggtgtgatgaacaaaggtgtggcgtatgctctgtgggactacgaggcccagaacagtgacgagctgtccttccacgaaggggacgccctcaccatcctgaggcgcaaggacgaaagcgagactgagtggtggtgggctcgccttggagaccgggagggctatgtgcccaaaaacctgctggggctgtatccacggatcaaaccccgacagcgaacactcgcctgaacttccttttggagcaccgcatggtcttgccagctaccaggagccacttaagagattattgtgctgttttccaggaaagctgcagctagaaaatggtcttaatggtgctcactttagcagacagcgtccacaatgtgaatcctacagtttccaggtgaggccctttctccagtttgcccattaactgggagaggtactttcgcctccaaggactgaattttgccaattactataaatccaaataaatacccactttcaaaacacccacccctcttgccattaagaagtcccataacccccggttggttgccagtgaagacagaagctcttactgacttggccccgaggccatcaccccctccagcagtgaacactgtccgccgctgtgaggcctgctcccctgcgaccgccctgccccccgtcaccgaatcggacactcatcctttctcacacttcccacacatgatccttcttcccttcatcaccaaaggagcctctgtatggaaacatgtccagtgttgctgcccagtgtgtatgcctcccagtacccactctgctcggccgccttgggggttccgcttcctgttccagttcacctaaaggctgattgtgcaggcccagcactgtggctggactgccgcgccacgggcaccaggacccctaagaccaagtgacaactgggagagcctcagcatatactcttctcctccgatctcacagcctgtcatgctgctcagtgtggttctcacccctgcaagctcaaattcagttccctgaatggagtcaggtgctggaggccgtggcagcggagggtggttggggttggggctgggggtggactggtgtgagggcagaccagggccaggtagacggggctgtttggtgcctgaaggatggcagacgcctggtgtcaggaggggccgccaccaaggagcagcagctggggcagaggagctggggtcaggggccacccctctctgccgatctccctgcctgggctggctgtgaggccacctttgtcccaggcccagcctcaaggcaaggagggcgcttcactgaggtgtgaattgtacgtacaggctttttatataccaaaagtattttttgactagaccattcaaagctacccgaactatgttggaaatttttttttttctcattaaaatacaggcccttaggctctatttttcatgtatgagtcgtgtgtaatttatgtaaaaatgtgtgtacagactcactgatgcagcactgtagcccatcaccttggagcactgactgtacatagtgtggtgaagaaaagtgaacgcccttgtagagcagcccgaccacaggagcatggccgctgccagcccagacgctgctgacgctgtgtaaatgtgcacaataaacccgtctcaccccgg

SEQ ID NO: 327 - DNA, 2858 bp, Homo sapiens
atggagaagtacgagcggatccgagtggtggggagaggtgccttcgggattgtgcacctgtgcctgcgaaaggctgaccagaagctggtgatcatcaagcagattccagtggaacagatgaccaaggaagagcggcaggcagcccagaatgagtgccaggtcctcaagctgctcaaccaccccaatgtcattgagtactacgagaacttcctggaagacaaagcccttatgatcgccatggaatatgcaccaggcggcactctggctgagttcatccaaaagcgctgtaattccctgctggaggaggagaccatcctgcacttcttcgtgcagatcctgcttgcactgcatcatgtgcacacccacctcatcctgcaccgagacctcaagacccagaacatcctgcttgacaaacaccgcatggtcgtcaagatcggtgatttcggcatctccaagatccttagcagcaagagcaaggcctacacggtggtgggtaccccatgctatatctcccctgagctgtgtgagggcaagccctacaaccagaagagtgacatctgggccctgggctgtgtcctctacgagctggccagcctcaagagggctttcgaggctgcgaacttgccagcactggtgctgaagatcatgagtggcacctttgcacctatctctgaccggtacagccctgagcttcgccagctggtcctgagtctactcagcctggagcctgcccagcggccaccactcagccacatcatggcacagcccctctgcatccgtgccctcctcaacctccacaccgacgtgggcagtgtccgcatgcggagggcagagaagtccgtggcccccagcaacacagggagcaggaccaccagtgtccgctgcagaggtatcccccggggacctgtgaggccagccatcccaccaccactgtcgtcagtgtatgcctggggtggtgggctgggcacccccctgcggctgccaatgctcaacacagaggtggtccaggtggcagctgggcgcacgcagaaagccggcgtcacgcgctctgggcgtctcatcctgtgggaggccccacccctaggtgcaggcggaggcagtctccttcctggggcagtggagcagccacagccccagttcatctcgcgtttcctggagggccagtcgggtgtgaccatcaagcacgtggcctgtggggacttcttcactgcctgcctgactgacagaggcatcatcatgacattcggcagcggcagcaatgggtgcctaggccatggcagcctcactgacatcagccagcccaccattgtggaggctttgctgggctatgaaatggtgcaggtggcctgtggggcctctcacgtgctggccctgtccactgagcgagaactatttgcctggggccgtggagacagcggcagactggggctaggcaccagggagtcccacagctgcccccagcaggtgcccatgcccccaggacaggaagctcagcgagttgtatgtggtatcgattcctccatgatcctcactgtgcctggccaagccctagcctgtgggagcaacaggttcaacaagctgggcctggaccacctctccctgggggaggagcctgtcccccaccagcaagtggaggaggccctgagcttcacactactaggctctgcacccctggaccaggagcctctgctgagtatagacctgggcactgctcactcagctgctgtgactgcctcgggtgattgctacacttttggcagcaatcagcacggacagttgggcaccaatactcgccgaggcagtcgggcaccctgtaaggtccaaggccttgagggcatcaagatggcaatggtagcctgtggggatgccttcactgtagctattggggcagagagcgaagtgtactcttggggcaaaggggcgcgaggtcgattgggaaggagggatgaggatgccggactccctcggccagtgcagttggatgagacacacccttacacggtgacttccgtgtcctgttgccatggaaacaccctcctggctgttcgatcggtcacagatgagccggtccccccctgaggcacccggattcacctctggaccaccctgatattgcttctcctctgaatgctctgaaaagtgcaggtgcccaaggcatgacttgcagctgtctcctggattgtgtcatcatggggtatcagggctggcaaaacccctgctctgcttttggccttggatatggaaacctcaaccactttgttctcctaccacctctttgcccttcctaccccttcctcccttcagtcagtgtccccagggtccagcctggctagagttagaaggcagacctagcctttggaagcagggtggcctccagagccttgccataaaaaggctgaaggcagccgggcgcagtggctcacgcctgtaatcccagcactttgggaggctgaggcgggcggatcacgaggtcaggagatcgagaccatcctggctaacgtggtgaaaccccatctctactaaaaatacaaaaaaattagctgggcgtggtggcacgcgcctgtagtcccagctgctcaggaggctgaggcaggagaatggcgtaaacccctccagcctgggcgacagaaccagactccgtctcaaaaaaaaaaaaaaaacaaaaaaggctgaaggcagctgtagctccacacagaccctaccctttcccctagcccagttagaaaataagtctgggccggcggcggtggctcacacctgcataggcagtgctttggccaggaggatcccttgatcccttgtggccaggagttgggagaccagcctggggaccatagcgagaccgctgtctccaccaa

SEQ ID NO: 328 - DNA, 8035 bp, Homo sapiens
cgaaaatcaccatcatcctcagggagccccctcgccctcggaaaacaaaaccagacatgatcctgggctcctgcttctgaaagatctgcccgaccgaggaggagggagcctaggttcaagtcgcaggaaaggtcacggcagggaagccccctcagcccctccgcgtcgcctccccgcgggccgcccctctcggccctgcgccccgcggccccgcagcctccgcgcggcctcccgccccatccccgccactttccccggagctgggccgcgaacacctcactattgatggtgtagcgctttaggggaaggaggtgattgtctaggagtaactgtatgtgcgctcagcacgggtcacaaccaccgtgggatccacttacagagaagatttgtggagagcttcagcctgtttatggtgttactgagaaaggaattgtggccatttgatataattctggatggaagacctcttatttgtattacattgaattagagcatttttgaaacgttggggttgttggagtggttggattttccctggaattgagtgagaaattcagaagactgaagcccaggctcactgtctacctttcacggaggcctagccgtgagaggacagaagaaggcacgtggcgaatcatgacagcggacaaagacaaagacaaagacaaagagaaggaccgggaccgagaccgggaccgagagagagagaaaagagacaaagcaagagagagtgagaattcaaggccacgccggagctgtaccttggaaggaggagccaaaaattatgctgagagtgatcacagtgaagacgaggacaatgacaacaatggagccaccacggaggagtccacgaagaagaataagaagaaaccaccgaaaaaaaagtctcgttatgaaaggacagataccggtgagataacatcctacatcactgaagatgatgtggtctacagaccaggagactgtgtgtatatcgtgtgtcggaggccaaacacaccgtatttcatctgtagcattcaagacttcaaactggtccacaactcccaggcctgttgcagatctccaactcctgctttgtgtgaccccccagcatgctctctgccggtggcatcacagccaccgcagcatctttctgaagccgggagagggcctgtagggagtaagagggaccatctcctcatgaacgtcaaatggtactaccgtcaatctgaggttccagattctgtgtatcagcatttggttcaggatcgacataatgaaaatgactctggaagagaacttgtcattacagacccagttatcaagaaccgagagctcttcatttctgattacgttgacacttaccatgctgctgcccttagagggaagtgtaacatctcccatttttctgacatatttgctgctagagagtttaaagcccgagtggattcatttttctacatattaggatataaccctgagacaaggaggctgaacagtacccagggggagattcgtgtcggtcctagtcatcaggccaaacttccagatctgcaaccatttccttctccagatggtgatacagtgacccaacatgaggaactggtctggatgcctggagttaacgactgtgacctccttatgtacttgagggcagcaaggagcatggcggcatttgcaggaatgtgtgatggaggctctacagaggacggctgtgtcgcagcctctcgggatgacaccactctgaatgcactgaacacactgcatgaaagcggttacgatgctggcaaagccctgcagcgcctggtgaagaagcctgtgcccaagctcatcgagaagtgctggaccgaggacgaagtgaaacgcttcgttaagggactcaggcagtacgggaagaacttcttcagaattagaaaggagctgcttcccaataaggaaacaggggagctgatcaccttctattactattggaagaagacccccgaagcagccagctcccgagcccatcgtaggcaccgcaggcaggccgtgttcaggaggattaagactcgcaccgcgtccacacccgtcaacacaccctccagacccccgtccagtgaattcttggacctaagttcagccagtgaagatgacttcgacagtgaggacagtgagcaggagctgaaggggtacgcctgccgccactgcttcaccaccacctccaaagattggcaccacggaggccgggagaacatcctgctttgcaccgactgtcgcatccacttcaagaaatacggtgagctcccgcccattgagaagcccgtggacccgccaccgtttatgttcaaacccgtcaaggaagaggatgatgggctcagtgggaagcatagcatgaggacacggcggagtcggggctcgatgtcgacactacgcagtggtcggaagaagcagccagccagccctgatggtcgcacctcacccatcaatgaagacatccgctccagcggccggaactcccccagcgctgccagtacctccagcaatgacagtaaagcagagacagtgaagaagtcggccaagaaggtgaaggaggaagcctcttcccctcttaagagtaacaaacgccagcgggagaaggtggcctctgatacggaggaggctgacaggaccagctccaagaagacaaaaacgcaggagatcagcaggcccaactcgccatctgaaggtgagggagagagttcagacagtcgcagcgtcaacgatgagggtagcagtgaccccaaagacatcgaccaggacaatcgcagcacgtccccgagcatccccagcccccaggacaatgagagtgactcggactcgtcagcccagcagcagatgctgcaggcccagcccccagccttgcaggctcccactggggtcaccccagctccctcctcagctcctccagggacccctcagctgcccacgccagggcccacgccctctgccactgcagttcccccacagggctcccccacggcctcccaggcccctaaccagccgcaggctcccacagcgcctgttccccacacccacatccaacaggcaccggccttgcacccccagcggccgccctcaccgcatcccccgccgcatccctcgccacatcccccactgcagcctctgactgggtcggcgggccagccttctgcaccctctcatgcccagcccccactgcacggtcagggcccacccggccctcacagcctgcaggctgggcccctgctgcagcacccaggccccccacagccctttggcctccctccccaggcctcccaaggccaggcccctctggggacctccccagcagcagcgtaccctcacacctccctgcagctgccagcctctcagtcagcgctgcagtcccaacagcctccacgggagcagcccctgccaccagggcccttggccatgccccacatcaagcccccgcctaccactcccatcccccagctggcggcgccacaggcccacaagcaccctccccacctctcggggccctcacccttctccatgaatgccaacctgcctccccctccagccctgaagcccctgagctccctgtccacacatcaccccccgtcggctcaccccccacccctgcaactcatgcctcagagccagccattgccctcctcgcccgcccagccccccgggctgacccagagccagaacctgcccccgccccctgcctcccacccccctacaggcctccaccaggtggccccccaacccccgtttgctcagcacccctttgtccctggaggccctcctcccatcacccctccgacctgcccctccacctctaccccaccggcgggacctggcacctcggcccagccaccctgctctggtgcggcggcttcaggaggcagcatagcgggggggtcgtcctgcccactccccaccgtccagatcaaggaggaggctctggacgacgctgaggagcctgagagcccccctcccccaccaaggagcccgtccccggagcccactgtggtggacacccccagtcacgccagccagtcagctaggttctacaaacacctggaccggggctacaactcgtgtgcccggacagacctgtacttcatgcctctggccgggtccaagctggccaagaagagggaggaggccattgagaaggccaagcgcgaggctgagcagaaagcccgagaggagcgagagcgggagaaggagaaggagaaggagcgggagcgggagcgagagcgggagcgcgaggcagagcgggcggctaaggcgtccagctcagcgcatgaaggtcgcctcagtgacccacagctcagtggtcctggccacatgcggccatccttcgagccaccaccaaccaccattgctgctgtgcccccctacatcgggcccgacacacctgcccttcggactctgagcgagtacgcccggccccacgtcatgtcgcccaccaaccgcaaccaccccttctacatgccccttaaccccacggaccccctgctggcctaccacatgcctggcctctacaacgtcgaccccaccatccgcgagcgggagctccgggagcgggagatccgagagcgggagatccgagagcgggagctgcgggagaggatgaagccgggcttcgaggtgaagcccccagagctggaccccctgcacccagccgccaaccccatggagcactttgcccggcacagcgccctcaccatccccccgaccgccgggccccacccttttgcttctttccacccgggcctgaaccccttggagagggagagactggccctggcgggcccccagctgcggcccgagatgagctaccctgacagactggcagccgagcgtatccacgcagagcgcatggcatcgctgaccagcgatcccctggcccgactgcagatgttcaacgtgactccgcaccatcaccagcactctcacattcactcccacctccacctccaccagcaggaccccctccaccaaggttcagcaggccccgttcacccgctggtcgaccccctgactgccggtccccacctggctcgcttcccctacccgcctggcactctccccaaccctctgcttggacagcccccacacgagcacgagatcgttcgccacccagttttcggcaccccctacccccgtgacctgcctggggccatcccaccccccatgtcagcagcccaccagctgcaggccatgcatgcccagtcggccgagctgcagagactggccatggagcagcagtggctgcatggacacccccacatgcatggtggccacctaccaagtcaggaagattattacagtcgactgaagaaagaaggtgacaagcagttataagttatttatttgttaacgctggctgtggaaaccccagttcttgggggagaaacaggactttttacataaaataggagctgcaaaagcaaaaagaatatcttctaaagatttctttatatatttaaaaacccacaactaaaaatgtatccacatagtagtgttcgtttgtcgagaggatttcctgagactggtttggatctccctgcatgacagtcccccagaaacttagtgagtcctggactggactgaacatccagaaagcttccctgcaatcttggggtttggctttagttttcttttccttgatttctcagtaggtgctagaatccagttcacacccttcactgtgcgtgcagacacactgacacactccgccacgagtgctccagagcccacgaggcttgcagatcgggggcataggaatttggaatccaagagctataatttttaaaaaaaaaaatcttttattttaatacattgtaggaaatcttcataattggagaaagttctgcagcatggctttttacgtctgtaaataaataattttagaacagcctttttttcttccataaactactattgtgatctattttttccagccatgtcactaattgtgaattcctaccaactattgacagaatacagagttgattttttaataaaaagttatatataattatccctttaattaaagggagcaaaggggcgtttcacatggacagaggcttggaccgaggcctggtcacagcagcgagcatccagggtttgcagggacgatgttacagactctgttttctgcctggcgtttcacttgtgtctgctcctagcctgtgctctgccagcagcacagacatctgctccatcagacctcttccattttgcacagggagtgcaggaggtgaatgttcactttctgttctccagtgtcactgttctgtttccacgggatggaaagcgcatgggcctgtgtccattgtagatttccttctagatttctgtgtacacacacttgattgttctggatgaatgtcttttttaatactccgaaaatttcatcatctaagaaaatgattccatacaaataactcagcacacaagtgacccaggacatatgcctgccaaagggatgtgttagaaggctgccttctcatgcgcattgtcacttggatcttgtggtgaggacggccccatctttcttgccacagattgaggccacttttgagcaagggagatcctggagttaagacaggtgttgggggcagcctgtattttaccctaggggcaggtctgcatggtgaccccacattgcactggtaaaccatttgagtcccactcttcatcctggaagtgggaactggagtcccacccacagtgcattcagaaagcatgctgtgtgggggctgcttctcaggaggccaggcccttctgagcggaaccgtcctggagagagcctgccctcgtttccaggctgcagccgtaacgcactttctcccaggctgagggcgggtgttctggggtgtctgccctctgtcggccctgcttcctgccaggacgtggcctcttccgatccttttctctcagacactggaggtctcttctgccattgtgctggtcccatcccaagaattgtaggacagagaccacactgggtcggcggacacaaagtccatccaggacccaggccgcagagggagcaggaagagttgctgatagtttgatctagaaaccagcagctactggctcaaattcaggttctggcgtcaaatagcgacatttccagtttctcttaaaaaccgtgtttggtttcagttgggataggcttgttttgtctgttgaaaatgtttctagttttttttctttcatttttctctcattccatttctgccttaactttagtttgttcacagggaggcaaagctgacatgaaccttttgtcgtgggacttcaggccacattggcttgaaggcattcgtttccttctggggtggggacaggccctcatggcaggcttgttcccgtggctctgagcgaggcctcttcctgctgggctcccagactcctgcatccaggcccccaccttctcggcttctggtttttctttctttttggtagaacacaacatctaccattcagttaaaccttctttatcccctcctttggcatccatttttccaaagaagagtcgagtcctctgaggtctgtgcttgaaaaccgtccgaaggcattcttgttagctttgcttttctccccatatcccaaggcgaacggctgagattcttccatctaaaaaaccctcgacccgaaaccctcaccagataaactacagtttgtttaggaggccctgaccttcatggtgtctttgaagcccaaccactcggtttccttcggattttcctccctttgttcggggtttggtttggctcctctgtgtgtgtccgtatcttgttcggtgtcctcgaggttgagcttcactccactgcggcagaggcagcgtgcacactcggatttgctacgtttctatatatcttgaagctaaatgtatatatgagtagtttgccatgagataacacagtgtaaacagtagacacccagaaatcgtgacttctgtgttctctccatttgagtattttgtaatttttttgaaatatttgtggacataaataaaaccaagctacactacacccttggaaaaaaaaaa

SEQ ID NO: 329 - DNA, 2944 bp, Homo sapiens
ctgcgggcgggcggtgcgatgtccggagaggatggcccggcggctggcccgggggcggcggcggcggctgcccgggagcggcgacgggagcagctgcggcagtggggggcgcgggcgggcgccgagcctggccccggagagcgccgcgcccgcaccgtccgcttcgagcgcgccgccgagttcctggcggcctgtgcgggcggcgacctggacgaggcgcgtctgatgctgcgcgccgccgaccctggccccggcgccgagctcgaccccgccgcgccgccgcccgcccgcgccgtgctggactccaccaacgccgacggtatcagcgccctgcaccaggcctgcattgatgagaacctggaggtggtgcgcttcttggtggagcagggcgccactgtgaaccaggcagacaacgagggctggacgccactgcacgtggccgcctcctgtggctacctagatatcgccaggtacctcctgagccacggggccaacatcgccgccgtcaacagtgacggggacctgcccctggacctggccgagtcggacgccatggaggggctgctgaaggcggagatcgcccgccgaggtgtggatgtggaagcagccaagcgggcagaagaggaattgctccttcatgacacgaggtgctggctgaatgggggcgccatgccagaggcccggcacccccgcacaggcgcctctgccctgcacgtggctgctgccaagggctacattgaggtgatgaggttgctccttcaggctggctacgacccagagctccgggacggggacggctggactcccctgcacgcagcggcacactggggcgtggaggatgcctgccgcctgctggccgagcatggcgggggcatggactcactgacccatgcggggcagcgtccctgtgacctggccgatgaggaagtactgagcctgttggaggaactggcccggaaacaggaggaccttcggaaccaaaaagaagcttcccagagccggggccaggagccccaagcgccctctagcagcaaacacagaaggagctctgtgtgtcgtctgagcagtcgcgagaagatttccctccaggacttgtccaaggagcgccggcctggtggggctggggggccccccatccaggacgaggatgagggggaagaaggtcccaccgaaccaccccctgcagaacccagaaccctcaatggcgtctcctccccgccgcaccccagccctaagagtcccgtgcagcttgaagaggcccccttctccaggcgctttggcctcctgaagacagggagttctggtgccctgggtccccctgaaaggcggacagcggagggagcccctggggctgggctgcagcgctcggcttcctcctcctggctggaagggacctccactcaggccaaggagctccgtcttgccagaattaccccgaccccctccccgaagctgccggagccctctgtcctgtctgaggtcaccaagcctcctccttgcttggagaactcctcgcctccctccaggattccggagcctgaatccccagcgaagccaaacgtccccacagcctccacggcgcccccagcggactcccgggaccgacggaggtcctaccagatgcctgtgcgggatgaggagtcggaatcccagagaaaagctcgctcccgtctcatgcgccagtctcggaggtccacacagggtgtgactcttacagacctgaaggaggcagagaaggctgcagggaaggccccagagtcagagaagccggcgcagagcctggacccttcccgaaggccccgcgtccctggagtggagaactctgacagccctgcccagagagcagaggcgcccgacgggcagggtccgggaccgcaggcggccagggagcaccgcaaggtcggaaaggagtggagggggcctgcggagggggaggaggcggagccggctgaccgcagccaggagtccagcaccctggagggcggcccctcggcccgcaggcagcggtggcagcgggacctcaacccagaacctgagccagaatcggaagagccagacggaggctttaggacgctgtatgcagagctgcgcagggagaacgagcggcttcgcgaggccctgaccgagaccacgctgcggctggcgcagctcaaggtggagctggagcgggccacgcagaggcaagaacgcttcgctgagaggccagccctcctggaactggagagattcgagcgcagggccctggaacgcaaggccgcagagctggaggaggagctgaaggccctgtctgacctccgcgctgacaaccagcgcctcaaggatgagaatgcagcgttgatccgcgtcatcagcaaactctccaagtgacccggagggactttcccgcacccgtatttatacagctgcttctgccacacgcaccccttcccccgtgtgaacacgagtgacagggctccgggggaagtctcagagaagccatagcccccctgggacctccggactgggaggggagcagagtccccaggagccgagggggccacccgaggccaggatggaggtgggaggccgagccaagcagggggacgttgccagaggggaccagggccagagacgggaccaggaaggaactgaggaccaagaagtgcaaggatcagtagccaggaccagagtggccgcctggaggtccccatctcacgtgtgatgccaccccgtcacccctcccctcctgagcagggatccaagaatgtgccaagagtcccgccagcctcagccaggtgggcctgtatatagggtccatgtgcaatagggagggacgtcttctattttttgctgccccctccccgcccactgtctggggcagggggagaaggtattttcgagataaagcacaggcaccacaaataaaagtcgtgaagttgccactcaaaaaaaaaaaaaaaaaaaa

SEQ ID NO: 330 - DNA, 2212 bp, Homo sapiens
agttggccttcagcccctgcctcggccagaggtttcatttttaactgaatatttacgaaagctgaaagcgtgcgaggggggtggggtggaaatagcggctgcttcttttccaaggatttatttaatggggatgtgttcaaggcaagaccgaattcagaaggatatcgacgtcgtgatccagaagtccagagctgaggactgcctgtttgcagggctcttcaaaggcctaaaagctaaaggcgaggatggattaattcaacaagtcctagtcgtgcgccctggtgagtgccagaccctgctccccgcgaggggacccatgagccaccctcaccacgatccctgccctggtggagcccccgtgcgggacacaggatccgaagatggcagcggaagttcctcagcggcctcaaaagtgactgggcagagtgggcacaggctccctcactgggtgaaggaggcgcaaagaacgggaagagccatcccgggagcccaccggcctttcagtttcccttgggcccccaggcggttcaggtatgtgtcggggccggggcgtttccggcagcttttgatgaaggcgaggggcaaggtcgtcctggttccagaatctcccaacctgcggatctccaatgagactaacacgattcaccactctaatctcttcagttttccaaagccttgcacagttgtactgtctggtgggctctgaggttgggacggttgggggagtgtttggtgagtgcacccttcctatagtgcccagaagaaggtacaatacctgtctctgtggcacaatcggttagcgcgttcggctgttaatctagaggttggtggttagagcccactgagggatgcctcctccagatttttttttttttttttctgagacagagtcttgctctgtcgccaggctggagtgcagtggcgcgatctcggctcactgcaacatccgcctccctggttcaagcgattcccctgcctcagtctcccgagtagctgagaatacaggcgagcgccaccccgcccggctaatgttttgtattttagtagagacagaggtttcaccttattggccaggatggtctcgatcagctgacctcgtgatccacccgccttggcctcccaaagtgctgggattacaggtgtaagcaaccgcgccctgcccggctgcctgcttcagcttttaaagcgttcatgcattatcaatcactagataaacggcggagattatatcttcccagagtcctaagccactagggttgtgtctctgtggcacaatcagttgtcgcatccaaaaggcctagctaacttttgtattttttgtagagaaagggtttcattatgttgcccatgctggtccccaaactcctgggctcgggcacctccgaggtctcccaaagtgctaggattacaggcatgagccactgcacagggccttatacaatgcttctaatttcagcacatttagcaaacttatcttctgcgggagaggtaccaaatcacattccagtttatttctcaactctaataatgtccctttcttcatttacttgctgacacaacaaattttctcccctcccgtactttttgttttgagactaggtgtcactctatcacccaagatggagtgcagtggcatgatctcatgtcactgcaaactcaccgcccctgcaaccatggcactagtgatcctccagaagagctggaactacagagaggacatcttgctgtgttttccaggctggacctgaatgaactcctgggctcaatcaatccttccacctcagcctaacatttacactgggagcagagatgcatttggacatataaactgttaacatgaggtaagcgccaaggtctagagaaggcagtggaagagatggcaaactccggcaccatgtctgcgtgtccagtgtgctctgctggagcagcacatttttgtacattgctgtatttgaaaaaaccctgcaagaatcatgaaactggacgaccatctttataacactcccagtgataaaacaagtaagaatggctggtttgtagtcatctgagcagcctctctagtttcgtagatatggtttctctctgatatcgaacgacttccaatgtcaagcggaatgctacatcacaaggataaccgtatgtgaaaagaaccagttttctttgtaatcctgaactttctagtttgcgcattaaaagacattatttgaagaag

SEQ ID NO: 331 - DNA, 1769 bp, Homo sapiens
ggataaatgactgaaagtttcttttttatattgctgagtcagattggatccggttcattaagggccaaaatttgtatttggcagtaatcctcatgtgttctcagaatgcttgattggtcattatcagttgcttaatgcttaccaaacacttccagtgttttgagtcactgaattggctcatggtaattgttaatcttgtggttactgagtcaagagccagcagtgtgtgttttggctgcttcacttcctcctcaacacttgatattgtcagattttaaattaattttttttttctaatctggtgggtttgaaattgtatctatagtgttttttatcagcatttcctgaagctgggcatcttttcatgtattttcgttggtcatttgtgcttctgcgaagtgtatattcaatttcgttgcctatttttttggtcttttctctttttctgatttatttttaagagttctttatatattctggatactaattatttgttaatttataggttgcaaatatcctttcccaatttgtgacttgtcttttcatctcttcatagtcttctggtgagaaaagctcctaattgtaatgaactgaatttttcagtctttcatggtttgtgttttgtgtttttttttattttttattttttattttttgagatggagtttcgctcttgttgcccatgcgggagtgcaatggcgtgatcttggctcactgcagcctccgcctcctgggttcaagcaattctcctgtctcagcctcccgagtagctgggattacaggtgcctgccaccacgcccagctaatttctgtatttttagtagagacagggtttcatcatattggtcaggctggtcttgaactcctgacctcaggtgatccacccgcctgggcttcccaaagtgctgggattacaggcgtgagccactgcgcccggctggtttgtgcttgttgtatcaaatttgggaaatccttctttgctgccaggcatgttgttttaataaatacagtagtatacctatctataatgtggtatatctcatctgacatttatttccaatatttgcttgattacaaaggcagacttcttagaagttgctttcttattatctttggagttatagggccacagggttttaaaaggaggttggattgtgccttacatgtgggtttcatacattgtccaaactgagacaccaacagatttgtgaatgagatgtgcatcttattaaatgttaatgtgatttgacaatgagacctttctttgtgtggacagtattatatacaattgatagtgtgtcattcagtctaagctgttagcactttcactaaaatatattcaaattttttttgatgtctagtttttacagtgttgggctttatcaagaatagttgtggattgtggaagagctgatatggaaacagaggaatgtattttgcttttttttttaaactctgtccggttccttggacttgtgtgtctcctatcttatcaagaataattgtagattgtggaagagttgatatggaaacatcttagaagaatgttttttgctttttttaaaaaaaaaaaacaaaactgtccagttccttggacttgtgtgtctcctatctaccattaaacccttatgacttaaggtatatgtataaatacatatatacatcttggtggcattgatttttctatgttgtgtattaaagctgctaaaaaacattttttctttttttcaatgagaagactagtgattactttgaaaaaaaaaaaaaaa

SEQ ID NO: 332 - DNA, 5112 bp, Homo sapiens
caggccaagccctaaaccaaaggctttggtggtgactctcatttataggtgccagaaccctaatgcaaactggctcagccaacaggaaaatttatcggctcatggtactgaaagcctcagaggtaggcttcaggctcggctggatgcacgggttcaaatgctatcaggactaggtctctctcagttctgctttgcaatgtgggttggcttcactttcaggcaggttggtcctccttctgggggcaaaggtggtccctggcagcccagcctgcatcccattagctcagccaccttggtgaaaggggaatccccaaatgacagtcagggagctgcccccgggacagaagagatgggcacaagcaggtgggagccacagccgtaacagctgacctcggtgggcatgttccatgctaatctggagcatctgggctgcttcccagaaactggcctcctctaatttatcaaggctggtccaggaatgcctcctggaagaagtggcacagcaaaagcacgttctggagacactttctgtccttgactttgagaaggtcggcaaggcaacatccattgaagagagtaagtagctgcctgccacccaggggctgcctatgtgagcggcacggggacgggatcaaagctcggggagcctcttctgccttcctaatagccagagttaatcggggcccagagtggaggctgtggctgggctgggctcagagatacacactctttgtggggaggtaagggagacaagtcctggagttgcagcacactcttcagtcagctgtgtgactctaggcaaatgattcacatctctgagcctctgcttccctatctgtataggaggagggcactgcacggggttcagtgaggtaaccccaggccacattcaaggtgcagaatgtgccgtcaaacagtagctgtgatcccagctgtgcctctgccccgtgggacctcccctcagaaggccaggttccttgtctgtaaggagaggctggtgacagcagcccctcccaggttgttgtggggactgcaggtggtggccctggtaagatgcttagagccaaagttgctcacgtgtcacatgggaatgcagggaagggacctcgcatcaagccacaccgtcccctcctccctaccccctcaggtcctagtggagggaaacctttcgggtccttgtcatgtgctctccccgagtcaccattcaggtttctgactggggctttcagtcatcccacaggcctcgcggacgaaggggtgcctgaagctgtggagagggtgcacagggcctggcagggtcctgtcctgccctgccacgacgctgctgaaccagctcaagaaaaccttccagcacagagtcagagggaagtacccaggacagctggaaataggtgggttcccttctgtcctgtcgtcccctcccacaagaaaggctgtattgagtctccagggccttcagggtggccacagctggcctcatttcaaccctttcttcacctctgtgtcttcatgccatcggacggaggaggtttctcagcttcagtgcgagtcacccccctttcaccgggcgagaaggggcctccacgtggggccttctgagcagtctgtggagccctgaagctgcgtgcaaacttggtgggccggtgcatttttttttttttttttttttgagatggagtctcactctgtcgcccaggctatagtgctgtggcacaatcatggctcactgcaacctctacctcccgggttcaagcgattcttctgcctcagcctcccgagtagctgggattacaggtgtgcaccaccacgcttggctaattttctttttttgtatttttagtagagatggggtttcgccatattggccaggctggtctcgaactcctgaccttgtgattcgcccgcctcggcctcccaaagtgctgggattacaggcatgagccactgcgcccggccgccagagcatttttctggggacagattccatgcctcccaccagagcctgacgggtaaagaatgaaccttatgggaagggaggcaggcaggggcccacgagggtatctagaaatgctggctggactgcgttcttccccagaatttgcctttctctgtggagcaagtgaaaggtgacagtcatgttccaagcaccacctggactgcttgttgacatgcatattcccaggccctgcctccgggattttgatccaggtgtggtgtggggcccagggcatggggatgaacccaacacggtctgactcagggtgagttggagtcacagtcctgactctagctgggcacactcctcccctacagcacagggaatgcagtgagggacacctgccctcgtgccatcagaaaccctttttttttttgagatggggtttcactcatggttgcccagactggaatgcagtggcgcaatcttggctcactacaacctccacctcccgggttcaagcgattctcctgcctcagcctccagagttgctgggaaacaggcaggcaccaccacacccagctaattttgtatttttagtagagatggggtttcaccatgttggtcaggctggtctcgaactcctgacctcaggtgatctgcccaccttggcctcccaaagtgctggggttacaggtgcgagccactgcgcccggcccagaaagccttttagctgaccaggctactcccagctgagaagcgtggagggtcgaggtctcagtttctcctgatgtactctcccctttggccagcgtgccgcaggctcctggagcaggtggtcagctgtggtgggctgctccccggagctgggctcccagaagaacagatcattacctggttccagtttcacagctacctgcagaggcagagcgtctctgacctggagaagcacttcacccagctcaccaaggaaggtaagactggggtgggtggctgtcatagcagaggaatatccacggagccctgtcacatgcagtttctcaggttataattcagaaccactacatccatccccgccaactgttcttttgggaaccccgatttaatgagattctgcgttcagccgatgggggctgatattagctccaagggaagtcagctttaaaaagcacggaacagaggtcagagctgggtaggagggtgatcttggctggccagagtccctggaagtgtgggctgtggttttattaatttatggagcatatttgaccccttgttaaaaggccttcctggagattccaggagctccctgtgaaattagtccaggctgggccttggtgatcatcccggtgggtctgggatttgttcctctgtggctactggcagcagccaagcaaacttgcagctgtcctgccaaactcccattcaggggacctgggcccacctctttcctgtcttctagtgacactcatcgaggagcttcactgtgcgggacaggccaaggtggtccggaagctgcaggggaagcggctgggccagctccagcctctgccccagaccttaagagcctgggcgctgctccagctggacggcactccgagggtgtgcagggcggccagcgctcgcctggctggtgcagtcaggaacagaagcttccgggaaaaggtacgttgtccagggcaggtggcagaccctggccacagatgtgtgggcataggtaagctggtgttctcatggaaaagtacaaagaagtgagtgccaggggctgcagtagctgtgagctattttgatggagggacctgggctacgatctaacacacatgaatgcaccttgctgcttccaaagcaacacatctgttaggcctctgagatgtcacttgcacgctgaatgtttttcttagtgcgttttttgtctgtctgtttagacagagttctgctctgttgcccaggctggagtccagtgccacgatcttgcaacctccacctcctgggttcaagcaattctcctgcctcagcctcctgagtagctgggattacaggcgcccaccaccatacccagctaatttttgtaattttagtagatacagggtttcaccatgttggccaggctggtctcaaactcctgaccctgcgatccgcctgccttggcttcccaaagtgctgggattacaggcgtgagccactgcgcccagcctttcttagtgttttgatagtcatccttatttactttcaattaatattcatggctacctggtaatgggtcactgtgttcagtccatttgaaaaccaagagagtggacctctctgctttttcactctttgcctgtaactactgtacgtttaaggcgccacaccctgaggggttcaggaagggtgacatcaagggcatagtctacactgatggtctcagctccagactagagaggaaatctccagttccattgccaatagcccttcttggagcccatccgcctactttgtggttgtttttaactctttatttggagacttttgaacttgcaaaagtagacagagcaatataatgaatccacctgcacccataacccaagcccaaccaccatcaacccatggccaatcctgcccctttcccctccactcccctgtatcactttgaagcaacctgaggcatcctatttgaccttaaatagttaactatatgtgtcaaaaggttaagaattctttcaaaaatcacaactctaacaccattatcttatctaaaaaattaactatcaattcctttatatcatatatcttatgttcaaatttccaagcctcaagcatcctgttttattttttgttaaaatagtatctacataaggacacacattgtgattggctgatggcttccaatcaatctaaaggtttttttccccgtttctttctctgcttgcaattaatttgatcgatcccaggttgacctagactatctagactttgctgcttgcaggaagtttaacggtagtttaatgtatttctctgtcttctgtagttcctgaaaactagtagttggcttcaaggatccactgaagtcaggtgtattttgttttttgggtatgggggtatataaacaaggcctccatgggaagcagaggctgcagggagccgagattgtgctactgcaccccaggctgggcaacgaagtgagactctgtctc

SEQ ID NO: 333 - DNA, 6477 bp, Homo sapiens
aaccggcgcgcgcgtaggggctgggaggccggcgcgcagatctggcggtgagcgctgccgccccggggcccccagccatgtcggccgaggagatggtgcagatccgcctggaggaccgctgctacccggtgagcaagaggaagctcatcgagcagagcgactacttccgcgccctctaccgctccggcatgcgcgaggccctgagccaggaggccggcggcccggaggtgcagcagctgcgcggcctcagcgcgccgggcctgcggctggtgctggacttcatcaacgccggcggggcccgcgaaggctggctcctgggcccgcgcggggaaaagggcggcggggtggacgaggacgaggagatggatgaggtgagcctgctgtccgagctggtggaggcggcctccttcctgcaggtcacgtccctgctgcagctgctgctgtcccaggtgcggctcaataactgcctggagatgtaccgcctggcgcaggtgtacgggctgcccgacctgcaggaggcctgcctgcgcttcatggtcgtccacttccacgaggtgctgtgcaagccccagttccacctcctggggtctcctccccaagctccaggggatgtcagcctgaagcagaggctgagggaggcccggatgactgggactcctgtcctcgtggccctcggggacttcctggggggacccctggcccctcacccctaccagggggagcccccgtccatgctcaggtacgaggagatgactgagcgttggttcccgctggccaacaaccttcctcccgacctggtcaatgtcaggggctatgggtctgccatcctggacaactacctcttcatagtgggcgggtacaggatcactagccaggagatctccgctgcgcattcctacaaccccagcaccaacgagtggctccaggtggcctccatgaaccagaagaggtctaacttcaaacttgtggctgttaattcaaaactctatgccatcggagggcaggccgtttctaacgttgagtgttacaaccccgagcaggatgcgtggaattttgtggcgcccttacccaatcctctggctgagttctctgcctgtgagtgtaagggaaaaatttatgtcattggaggatacactaccagagaccggaacatgaacattttgcagtactgcccctcttccgacatgtggacgctctttgaaacatgtgacgtccacattcgcaagcagcagatggtgtctgtggaagagaccatctacatcgtgggggggtgtctccacgagctggggcccaaccgcaggagcagccagagcgaggacatgctcaccgtgcagtcctacaacaccgtcacccgccagtggctctacctcaaggagaacacgtccaaatcgggtcttaacttgacttgtgcgctccataacgacggcatctacatcatgagcagagacgtcaccctgtcgaccagcttggaacaccgagtgttcctcaagtacaacatcttttcagatagttgggaagcatttcggcgttttccagcttttggacataacttgctggtttcttctctttatctgcccaataaagcagaaacatgactgaattgaattggtagatgaaaaaaacctggttcaagttttttttaaaatgtggtgtcccattccaagggagaccaattcctaaagggtaaagaagggttaaagtaggtcacatatatacagtagcagctgtaaataagcttacttgaactaattacttgaaaactggtggaaaaaagagaccaactttgttattttttaaattattgatttttaaattatgggagcaaatccatctccaaacatgatactcttgggccaatgacggatcatcaaaatgtagattcattgtgtctgtgtggtaaagggccaaagtcaataattgggacaaatggtaaagatgattttaaaatctgttgtatttaggtcccttgacatatcattagcaccttaagtgagaggttttctttttcttatcagtgtccttgacaagcattcatattaacatattcattctctcttctccatcacccatacccacacatacatctagtatgtttagggttctgtgttcagatattttgtttgcacactactttttaggaaacttataatgatggagccctacagtgaatccttaccagtgttcagtcctccccaaaacttgcataaaaatattcttagctatttttccagccttttttgcagttacaaatgctggataaatagactgataaaacctcttattttatttatgtggcaggttgcatatttatgtggacacataggttgcactgctaggcattctgtattgttttaaagaggatatattatttagaaaaatggacatatgaatattattaaaaattgagtcttaaatttaaatgggaagggaagaaaacaccaaataagaaaaaaatttgcctttaagagttacttttgttgaatgtatttgacttagttcttattttaaggctaaaaaaactttgtcatatttaagtcggcagctttctaatttaatcttagctttgtaattcatgttttgcttttgtggactaaggtaaggacagcatttaaatatttgtgctggagtgaggggaagaagctgttacagaagtggaatggtttctggtggtatttctgaagttaggtaaagtgctttacttgccttggttgttaattgaaatagaattcagctcaagcagttgttttcagtgagtgagttaacaataaaagcttctgccaatcatagatcaacattcctcaaaaatacatacactcatacttatggaaattttattttgattgaaaacactctgaaattatctgatattttgtaatggcatcagttaaactgtgagctggattccatctttctgcagtaacagcgggcagaaccatttcagttagcatgtgcctcactttaagaaagtcctgtaggggaaaaaaaaaactgtcagagcgaattcatgcattcaacaaacacttatgagtgcctggagtatgccgtccactgtgcagatgtaggacaggggctaatcacttagagttcttcagtttattagaggagtgactacaggttttctttacaaccatggcctctagtatacttaaaataagcgtccagttataaaaagcctatttgcacaactttttgggaatacttctattaactaaaatgaggtaagccattattttggacatagaaacagatctttgtatcttgtcaccaaataatcttacctctagtctacttacaactttgtaagggtttctaagctatgcccatttattcccaaatattaagcccttaaaaaaataaaacctctgaaccaaaatcttcccaggaatagtacttaatagattttaatgttaatttatattcattgtagaattgaatttccagtgacctgtaatttcattacatatattttaaaatctatttattttagatggtgttaacttttcgttgctgaagagcttaactttttaaaggctttgtcctatacatttagaagatgagtcagttgaattagtactggacaaacagttggagattagtttgcaaataagcatatcatatcaaatacaatattccagccaaccagttaattctcttcctggttacattcattgggtctatttgcctaatgttgacaattagattcttggaccaagtgagggtgtactctgatccacaaagctcttttataaaccaggtttgaggttgtgtgtgtgtgtgggggtgtgtgtgtgtgtgtgtgtgtatgtttgcatattatagctctctttaagacagacatctaaaaagattttggttattctgggctgccagcagtacgtgggaaaggtggaatgtgcaataggaacagatctgtgcattttgtgacatcgtccttcctgctgtgcacatcagctgtgatgacattttgagggtagttttaatttagctcggttctcttgttggtgccagtattacattgaagactacctatgatagaggcaatgttgctttgaaaatctcccttcaggcggaggttgcagtgagccgagattgtgccattgcactccagcctgggcgacagtgcaagactctgtctccaaaaaaaaaaaaagaaaaaagaaaatcccccttcatcccccaggactgtcctttactctttgatagtatccctctattttcttcccaattctctaaatgctttatcattttttcctgagatgcttctgagggatgctgacctcccactatggggaaaagggttgcttggaggacctggggtggcagccccccgaccagaagcaccctattttatagatagcagtctgaatggtagagagtcctgtgtgtgggttgttagaaggttggttcttcctgttattctctctggctttcctttcaacccacttattttcagaggcctctccccttagcatcctttaaaaggttttctgatgaatgtgtgaaagagttgattatttcaacagtattggttaagtcacaacgacgaagtgctgagaaggttatgggtaccaggaagaaacaaacagaagtcttaagattagaatgagaaccaaagagaatttaaccctgccatttttttttttttaacaccaagatcctaagtaattccaaatgccttagatatcaatgaaagctacacaccattgagatgggcaaaattctttctctacaaagggagtaatcaagtaaatacctgttctctttcaatggactgttgcctattgagcattgtggatgatgtgttttcagatttccaggtgaagttctgaccctacctgtttggccaaagacgtaaattgagaggaaaggccttggtcttcctgatcaaccagcatttaacgaacagtggcttaatgcagatcactcaagaggcagcatagcaatgtaaaaggaatataagtaggtgttggatgcctttttcctagaccaggaatggggaatatataacacctgtgccaccgctcttttaaggaggcattatgaatgagtgcagcattcctgtcctctgtgccaggatttggtcttagaatccatgtcagattggtgcttccagacatctattcccagtccatcagagtgaaatgaaggctatttgccatccctgccttagacagaggagtgaaagaattaagtgggtagacaccaaccaaaatgactttgaaagcagtgagctgattgagctccagttctgtggttaccagaaatactgagtgtctgtcatgtgcaagacaatgctaagaacagaatacagacataaataagtcacggcccatgaccttgaagagcttacggccttataaagaggttcactgtaattgtcttcaccagggcgtccttctcaaagatgcccacttttgtctggcacattggggctcggtggtctggtggtcccttcggtcttggccctatctgtcctttgtttttgtgatttactaacaatcatcacgaaccagttttgtttttcttttaaatttgaacatcacatcttgtgttttagttttttgctctatgatttttttctcactgcttttcagtcttctctgtacttcatttttgtgaaaaagtgaaaatcacatataatctttatttaaaaatgctcaccaagcactgcagactttggagttagggattcagcagcttgttccagtgaaaaggaggagtgaagctggggaagttagtatctaagaggggcaagctgattgcatgtgcatttatacctatgcctttaaaacattcccataaaaagtattaataaagaaatttccattccacactagtactgatgaaaaggtggttgattttgccttgtgataattatcaaaggatagtttttcatccttagattttattcacatgagagattttttttattttctctgttgacttaggaacacatcataaattcacaccaactgacacgttgctgacgtctgtacttgacataaccatttttattcatacaggaagcattaaatataaaagatggtcagttttgaagagcaaagggtgctgaaatgacttgtacggttggctggtgctttctcaaatggattgccatagttcattactagtaaagaaaaggaaaatgtgatttacgttgtcatttttcctattaaaaaaaacccttaagaatggggcacttgagctgtccctgcaatgttttcatatctagtagtcattttagggaaagtgataatctgtagaatgaatagttatgttttgatatgactgatactttctttgttaaaaggttgtattaagtcttcaatttcaagtctagcttaaaagtgtaaacattatgtgattcatttgaatacaagaatgcctatgaaatacccactataacagcattccttttgtgtttagaactatagaagaaaatgtcttcaaataaagtagttttcagtcaaaaaaaaa

SEQ ID NO: 334 - DNA, 1566 bp, Homo sapiens
atggcccaaggcttccatcgttcctctgtccctgaatcaactctgtccagacccgagctttggatctaccaaggcctcaagccaccaaggaaaatgaagggcctctaccaggctgctggccggattcttgttactctggggatcctcagtgtatgctctggagttattgctttctttcctgtcttttcttacaagccttggttcacaggatggagtgttcgaattgcttgtcctatctggaatggagctttggccatcacaactggtgtgcttctactgttggcttacagagagtggacccagaggtacctgggggaagctactttcacctttgtgattctgagcattatgggatgtccacttcattttgcaatagccttggaatctgctctcctgggcccatattgcttctattcattttcagggattgcagggactaattaccttggctatgcagttacctttccttatccatatgcaaaattcccattagcctgtgtggacccaccacactacgaagagtaccacctgacacttcaagccctagacctgtgcctaagctttaccctactctgtacatccttgacagtgttcatcaaactttctgcaagacttatccagaatggacacataaacatgcaactccctgctgggaacccaaaccctttttcaccataaaaggtaaaatggtctggggatagaaaaggcctgggaccagaatataaaagcacacagattaatagaattataaaatttaagatgtttaaacaagctttatataaggtagttgaactcctttacctaaatgtcttattaaaatgggtactgcatctgactgggatgtttcccctttctagtactatgaagctgaaggcatgtaaatctgctcttttaggaaatgttaattaaacatgctaaatgggaactagtaaaatcacctaagcccacaaagtatagggtagtacctggagtgctagtctagatgaattagtcactgcatagccctttgtgtggagcattcatcggggctgaatggcaaaagactgtgagtgtttttctataacaacaactgaactagagaatttccacttgatggggcatttactgccttgttatagaatattaactgaagctacctctatgctaatggaaataatggtgcccaaaagagttccatgataaaataaaaatggtttacataaaaaaaaaactcacacacatggaatcaagtaatatttgacaagggtgtcaggaatgcataatgaggaataatagcctttttaataaatggtgttaggaaaactggatatctacatgcaaaagaatgaactacgaccccgatctgaggccagtcacagaaattaacttaaaatggattaaagatttaaatgtaagacctaaagctgtaaaactactgaaagaaaacatagggataaagctccattgacatttgtcttagcactgctttttttggatatgacatgaaaagcacatgctaccaaagcagaaataaacagtgggactacatcaaactaaaaagcttctgcacagcaaagaaaacaatca

SEQ ID NO: 335 - DNA, 1566 bp, Homo sapiens; identical to SEQ ID NO: 334

SEQ ID NO: 336 - DNA, 2941 bp, Homo sapiens; identical to SEQ ID NO: 121

SEQ ID NO: 337 - DNA, 2178 bp, Homo sapiens
gctcagtagcgatagcagcggccgtggaggtggcgttggggactgttttctctcggaggccggagcggagccgcgtctgactgaggcgggcagcaagcggccccctcgctccctccctccctcctccgcgccctccccgccgccaccagccgtcaaacgccaaccgccgctcctggggaggagccgcggctcgcggggccggagccaggcctgcgtccggacatcagccggagccggagcgagagccggggcctcggcgtccccgccctctccccgcctcggccagcgtccgccgggcccccgcgcgtcgcgccatggactcggacgagggctacaactacgagttcgacgaggacgaggagtgcagtgaggaggacagcggcgccgaggaggaggaggacgaagacgacgacgagccggacgatgataccctggatctgggcgaggtggagctggtggagcccgggctgggcgtcggcggggagcgggacggactgctgtgcggggagacgggcggtggcggcggcagcgctctggggcccggcggtggcggcggcggcggcggcggcggtggtggtggcgggccggggcatgagcaggaggaggattaccgctacgaggtgctcacggccgagcagattctacaacacatggtggaatgtatccgggaggtcaacgaggtcatccagaatccagcaactatcacaagaatactccttagccacttcaattgggataaagagaagctaatggaaaggtactttgatggaaacctggagaagctctttgctgagtgtcatgtaattaatccaagtaaaaagtctcgaacacgccagatgaatacaaggtcatcagcacaggatatgccttgtcagatctgctacttgaactaccctaactcgtatttcactggccttgaatgtggacataagttttgtatgcagtgctggagtgaatatttaactaccaaaataatggaagaaggcatgggtcacactatttcgtgtcctgctcatggttgtgatatcttagtggatgacaacacagttatgcgcctgatcacagattcaaaagttaaattaaagtatcagcatttaataacaaatagctttgtagagtgcaatcgactgttaaagtggtgtcctgccccagattgccaccatgttgttaaagtccaatatcctgatgctaaacctgttcgctgcaaatgtgggcgccaattttgctttaactgtggagaaaattggcatgatcctgttaaatgtaagtggttaaagaaatggattaaaaagtgtgatgatgacagtgaaacctccaattggattgcagccaacacaaaggaatgtcccaaatgccatgtcacaattgagaaggatggtggttgtaatcacatggtctgtcgtaaccagaattgtaaagcagagttttgctgggtgtgtcttggcccatgggaaccacatggatctgcctggtacaactgtaaccgctataatgaggatgatgcaaaggcagcaagagatgcacaggagcgatctagggcagccctgcagaggtacctgttctactgtaatcgctatatgaaccacatgcagagcctgcgctttgagcacaaactatatgctcaggtgaaacagaaaatggaggagatgcagcagcacaacatgtcctggattgaggtgcagttcctgaagaaggcagttgatgtcctctgccagtgtcgtgccacactcatgtacacttatgtcttcgctttctacctcaaaaagaataaccagtccattatctttgagaataaccaagcagatctagagaatgccacagaggtgctctcgggctaccttgaacgagatatttcccaagattctctgcaggatataaagcagaaagtacaagacaagtacagatactgtgagagtcgacgaagggttttgttacagcatgtgcatgaaggctatgaaaaagatctgtgggagtacattgaggactgagaatggccctgcataaaatgaactctgaaaactttaccatctagagtgctcatgcaattaaaacaaaacaaacacaaacaaggaggcactaagcctattctgacaccactggtctgtagtaccagaattgttttgttaatggaaagtttaagtaaattatattgtaataaaaaggtagataaaccattgt

SEQ ID NO: 338 - DNA, 3877 bp, Homo sapiens
ggaggaaagtgtgccatggcggagcctgtggggaagcggggccgctggtccggaggtagcggtgccggccgagggggtcggggcggctggggcggtcggggccggcgtcctcgggcccagcggtctccatcccggggcacgctggacgtagtgtctgtggacttggtcaccgacagcgatgaggaaattctggaggtcgccaccgctcgcggtgccgcggacgaggttgaggtggagcccccggagcccccggggccggtcgcgtcccgggataacagcaacagtgacagcgaaggggaggacaggcggcccgcaggacccccgcgggagccggtcaggcggcggcggcggctggtgctggatccgggggaggcgccgctggttccggtgtactcggggaaggttaaaagcagccttcgccttatcccagatgatctatccctcctgaaactctaccctccaggggatgaggaagaggcagagctggcagattcgagtggtctctaccatgagggctccccatcaccaggctctccctggaagacaaagctgaggactaaggataaagaagagaagaaaaagacagagtttctggatctggacaactctcctctgtccccaccttcaccaaggaccaaaagcagaacgcatactcgggcactcaagaagttaagtgaggtgaacaagcgcctccaggatctccgttcctgtctgagccccaagccacctcagggtcaagagcaacagggccaagaggatgaagtggtcttggtggaagggcccaccctcccagagaccccccgactcttcccactcaaaatccgttgccgggctgacctggtcagattgcccctcaggatgtcggagcccctgcagagtgtggtggaccacatggccacccaccttggggtgtccccaagcaggatccttttgctttttggagagacagagctatcacctactgccactcccaggaccctaaagctcggagtggctgacatcattgactgtgtggtactaacaagttctccagaggccacagagacgtcccaacagctccagctccgggtgcagggaaaggagaaacaccagacactggaagtctcactgtctcgagattcccctctaaagaccctcatgtcccactatgaggaggccatgggactgtcgggacggaagctctccttcttctttgatgggacaaagctttcaggcagggagctgccagctgacctgggcatggaatctggggacctcattgaggtctggggctgacaccccactccctgtttgacggcccagcctggacttggggagaatgactttcccttttttgccccataagggctagcataagctgaggtagaacttatctttaagctgcagcaaaatcaaggagtgacttttgtcccctctcctgttgaccctggtttagagccgttaaccacttggtgagttatgtgggtgttgttgccctgggtggcctgtggctccgtccacaagtcatgctgagttttgcagcctctgtgacttggagatgtcccttcacccctcccctttcaccaccatcctcttttcctcatggaaatgtctgctttatgaaactatgcacatattgaaagtgagttgaaacaaatgagggttgggtaggagcttccaggcctgggatttacaccacgcctagcccagcagaggccttagtcccatttggggcttgggagtgacatttgcttgaggcttatacactggtgtggttgcctggcttgcaggaaatgaccaagctcacacatgctggctgaagcgtaagcagacaactgaggtactcttttgaaggatgaaggtggtggattctcagccctgggggtcttcctcacctgaggacccttcagagccaccctttctagtttgcatttcctggtgcacacatttaaggcataacagcacattcatccctttggtttgggatctcaggaatacagtcccatgcaaagattctctggttttatggcttttttccctttctttacaccatcctctcccataagcacccatgtctttgaatatgaatgtatttgtaaaataccacgtttcatgtgtgaatatgtgcttttactgtacatagtgctattgtgcaataggtcttatgctgttttcactcaatgtgtgctaagatctagccccattgactcttctagaaatgcagtattgctttgacctgccatgtggcactccacaatgtcaattgcagtttacacacattgcctaaagtgggggacacctgggtgcccctgaccccttggcaccggatacaggccacgataaacatcctttcgtgtgttcccttctgtgcttgtgtggcatgtgtacccaggatgggcctataggtcacagaggtcagtttctctttggttttccagattttctttagaacggtgactgaccctcctacttgaggccgcccttttctccttatccttgccagcacttgtattgccagactacctaatttttgccagtctcatgggtagatagtggtgcagtgctttaacatacattcatctgatcagcattaatttggggaattttttcacttagcctttctggtttcccttcctgtgcattgcccattttctcatggagtttcttatcttttttggtttattctcaggagttgcttgtacattcttgggcaattgcagataattccaagaatgcatatttgggctgggtatggaggttcactggtaatcccagcactttgggaggcccaggcagaaggatcgctgcagcccaggagttcgagactagcctgggcaacatagcgagacctcgtctctacaaaaaaaaattaaaaagggggctttgggaggccaaggcgggcagatcatgagggcaggagattgagaccctcctggccaacatggtgaaaccccgtctctactaaaatacaaaaaattagctgggcatggtggcgcacacctgtagtcccagctactctggaggctgaggcaggggaatcgcttaaacccaggaggcggagattgcagtgagccaaggttccaccactgcactccagcctggcgacagagcaaggctccactcaaaaaaaagatttaaaggggaaaaaattgaaattttctttgtatctaggggtatccgtcactgaacagaaattcttaattttggctaggcgtgatggctcaggtctgtaatcccagcactttcggtggccggggtgggtggatcacttgaggccaggagttcaagaccaccctgaccaacttggtgaaatcccatctctactaaaaatacaaaaattagctgggtgcagtggcgcatgcttgtaatcccagctactcaggaggcagaggcaggagaatcacttgaacccgggaggtggaggctgcagtgaacagagacagtgccactgcacatcagcctgagtgacagagagactttgtctcaaaaaaaaaagaaaattttaattttaatgtagacagtatgaattatcttgttctgcagttggttgctttttgattgcttatttaatagagttgttaagatattttacatcttctcctgttagctgttcagcttttcctttcatattgagaacactacacagtgctgaagtccagctggtacacaccggggtgacaccttggctgcatctgttctcaacagtcagacacttcttctaattggttgatgctgggctgtactggttgctaaatattgcacatcattttaaaactatttgagatgcacttttgtactcaggaggccaaggcaggaggattgcttgagcccaggagtttgagaccagcctgggcaacacagcgagaccttgtctcttaaaaaaaaaaaaaaaaaaaaa

SEQ ID NO: 339 - DNA, 3598 bp, Homo sapiens
gtggtgggctagaccagtttcgcgcggccgctcgccgtcccccgcccagtcgtactcggcgccccagctcggtgctgccgccatcttcttggaggacaggaggagaggcgaaggctccccctccccgtgatcgctccgcactcccgccaccacctgccctcccgcgaccgcctctctcctcctcagtgggcacttgtctccttctaacaaacggccttccccccactccagttacccaccgcaaggcgaagattctcattacctgttccactcttataagcataagaaaaccgagctcataagcatacagaaactgctgtaaaagaagaagttgtgggtatttttttttttttttttgtctggaggaatggggacaccaaaactcatttggcagcagaggtgagacgaagcttcacaaaagatgtctaagcaacagccaactcagtttataaatccagaaacacctggctatgttggatttgcaaacctccccaatcaagttcaccgaaaatcagtgaaaaaaggttttgagttcacactgatggtggtcggtgaatcaggtctaggaaaatcgactctcataaacagcctattcctaactgatctgtacccagaaagagtcatacctggagcagcagaaaaaattgaaagaactgtccagattgaggcttcaactgttgaaattgaagagcgaggggtcaagctacgcctgacagtggtagatacccctggctatggtgacgctatcaactgcagagattgttttaagacaattatctcctatattgatgagcaatttgagaggtacctgcatgacgagagcggcttgaacaggcggcacatcattgataatagggtgcattgttgcttttactttatttcaccttttggacatggacttaagcccttagatgtggcgtttatgaaggcaatacacaacaaggtgaatattgtgcctgtcattgcaaaagctgacactctcaccctgaaggaacgggagcggctgaagaaaaggattctggatgaaattgaagaacataacatcaaaatctatcacttacctgatgcagaatcagatgaagatgaagattttaaagagcagactagacttctcaaggctagcatcccattctctgtggttggatccaatcagttgattgaagccaaaggaaagaaggtcagaggccgcctctacccctggggtgttgtggaagtggagaacccagagcacaatgactttctgaagctgagaaccatgctcatcacccacatgcaggatctccaggaggtgacccaggaccttcattatgaaaacttccgttctgagagactcaagagaggcggcaggaaagtggagaatgaggacatgaataaagaccagatcttgctggaaaaagaagctgagctccgccgcatgcaagagatgattgcaaggatgcaggcgcagatgcagatgcagatgcagggcggggatggcgatggcggggctctcgggcaccacgtgtaaggtgatgtgcacatatcaagaagtcagagaaaacactttcctggataaaaaagaaaacattccagatgcatgatccagctgtgtgttttcaatccttgggagggtgccatccacattttaacagtacctgtgcctgagaatttaatttttaaaagactttgatgtgtttttgtatgaagtacttttaacgtatgtatttcattgctgtgtcacactctgtgttttgtgaggtgaatgtcttccttttctttctccctaaccactaatgttagaattgatttccaagaatcggcatgtatacttaatactgaatttctttgatttaactgacttaacaactgactaaccattgatgagcactcctgatttttatctagaacattcagatttaccataatgttccttagtggtagaggtgtgtgcctagtgatgtagaaagatacactgacttggtgcaaggccatctgcttaccacatcacaccacttggagatctttgcttccttgcttttatgtttgtacacaacacctaaaaccagttttgctgctataattctatactgttgattcgtctgcgattttatctgttaaccaaataaaacataatagaatttcctaatgagatatatctttatacttaaacagcttttttagaggtgagttttaaagaagtctcttaattctgatgctaggttgtttttaaaaccactatgcaaagaactcaccacaagccaccttttgtagtgttctccactaatactggttatcctgtgctacagagaaaatcaaagcagtcataagctccagttttcgtattgcaaataagactcttacctacaaaatgagattcagtgaactaatttggtttttactcaaccaaattaaaaatttttttaaggaaaattagcagttggtctattcagaatcaaacctttttatattttatactgcactttagtgtattttctgtcactgtaggtatagaagatctgcctcccctgtggaaattggggtctgttggtgggcgtgcccctgaagcctggcttgggttgaaaagtgttcccgccctaaggccttggtgccctgaacctctgatgcctaccgggttctcctgatttgagtttcctttaaatactccctttttgagtaattttctgatgggaggaaagtagcagtcatcatctttttgtgtgcaggctgtctcatttatttttagccattgtcgtttcattcattttgtgtaatataaaccgtgtgtcatgtcaaagtgaaagacatttcaaatctgtagcataggctagtgggcaggtccgcacagtcgaagccacacctggtctgttttctgtgcactgtagccttagtgtcacctttcttcttgtgtctccttatggtacactccagcggttgccttttttatcatttctactgaagttgggaaattcaaccccagaaattgacagatgaaaggagacaatggttgtgtagggagatggagaaaatgcttaatctgaggatgagacagggttttttcatttttgtgggggctagaaaaaacataaaatgaggcagttaaataataatagttaatgaaggtgtgctacagaaaataatctggtgttcttgctaactttgcccttcactgttgcttaattgtgaacagccaaaagctatatgttatggcttattgtgtgaaggtaactaagaagtggtgttccatgacttcagagtacatccatgcggagtccattatttgagtttgacatttaataactttgctggaaaatctgtaaaaaagaaaaacaagtttgctagtgactaagccccgcatatgtgagtgaaagtacttcaggcacgctgcctcctggtaacagctatgcagggagggaggacccacactgctacacttctgatcccctttggttttactacccaaatctaaatagatacttttgataatagataactgctcttttactaagacatagtctctacctatagaaatgtattttgaaaacacttattttacacagcaattttgtatccatttaaactaaccttttatcaataaagcactattgtttagatattaaaa

SEQ ID NO: 340 - DNA, 1005 bp, Homo sapiens
acagcttggagtccaggccgggttttcaagcatcaagacggaagtaacagcggaaaggaagttccaaggcccgcgctgggaaaaaggtggggggaccaggggaagactcggagtgcgatggcggcgcaaattccaattgtggccaccacttccactcccggaatagtccggaacagcaagaagaggccggccagcccttcccacaatggcagcagcggcgggggctatggcgccagtaagaagaaaaaagcgtccgcttccagctttgcgcagggtatcagcatggaagccatgagtgagaataaaatggtgccctctgagtttagcacaggacctgtggaaaaagctgccaaacctttgccatttaaggatcccaactttgtgcactctggccacggtggcgcagtagctggcaagaagaacagaacctggaagaacctgaaacaaatcctcgcttctgaaagggcattgccgtggcaactgaacgatcctaactacttcagtattgatgctcctccatcctttaagccagctaagaagtattctgatgtttcaggtctgcttgccaactacacagacccccagagcaaactgcggttcagcaccattgaagagttttcctacattcggaggctgccctctgacgtcgtcaccggctacctggccctgaggaaggccacgagcatcgttccctgagccccagaaagggagatgaagtggaaagctgtttcaaaaacagactctggactcatgattttgtttcacggaaacaaactcgttctgctgtcaatctgaaaatgccagtgctgtgccttggaaagaatgtttggctttaatttaagggttttttttttttttagtgtgtgttttccctccaagtgtgatatttcctgctgaattaaattatacttcagttgttgcctcaagtaaaggtgtttgacaagaagatacaataaaaccatacttttcatttaaaaaaaaaaaaaaaaaaaaaaaaaaaaaaaa

SEQ ID NO: 341 - DNA, 5330 bp, Homo sapiens; identical to SEQ ID NO: 160

SEQ ID NO: 342 - DNA, 1185 bp, Homo sapiens
ggcctccaccgccttccccggctgcccggcagcctcccctcgctcgctctcctcttcctctagggccccagcgcagctcgggagcccgcgcaccgaggcgctaggggcaccgcgcactagagggacacccgccgcgcctggacagcccccggcgggcgcccccctcgcacctcctgccccgcgcgggccgcgctcccctcccccgcgcctgtgtccccagggcgcagggccgcgcgtccagccccagacccgccggggtccctggggacgcgccagcccggcagtggctcgacgatggaggagccgcagcgcgcccgctcgcacacagtcaccaccaccgccagctccttcgcagagaacttctccaccagcagcagcagcttcgcctacgaccgggagttcctccgcaccctgcccggcttcctcatcgtggccgagatcgttctggggctgctggtatggacgcttattgctggaactgagtacttccgggtccccgcatttggctgggtcatgtttgtagctgtattttactgggtcctcaccgtcttcttcctcattatctacataacaatgacctacaccaggattccccaggtgccctggacaacagtgggcctgtgctttaacggcagtgccttcgtcttgtacctctctgccgctgttgtagatgcatcttccgtctcccctgagagggacagtcacaacttcaacagctgggcggcctcatcgttctttgccttcctggtcaccatctgctacgctggaaatacatatttcagttttatagcatggagatccaggaccatacagtgatttaccattttgataattaaaaggaaaaaaaaaggaagactctcactgtaaaaacagctgtaggtataatgtatattcccagagaattgtatttaactaattaatgttttttatattcttaaatttgctcacaaattgtggtttgttacaattaaactggatacttatttgcaaagtgttgtagcttataatgaactcttaagtatcttattaatgtattaatgtcttcatagatcatattttcttagacaatgtttaaatagataaattgctaatattgagaatgtgtcaagtttgtaaacctaacttttaagatgccagattcttttttgattaaatgttgcaaaatcccaaaaaaaaaaaaaaaaa

SEQ ID NO: 343 - DNA, 1717 bp, Homo sapiens; identical to SEQ ID NO: 123

SEQ ID NO: 344 - DNA, 7497 bp, Homo sapiens
gcgcaagaggatcagggatagcctctgagctcgggttcccagggttcgtagcttccaacggctgcgcgcgcacttcggtcgcgggcggtgaggtgctgttgctgaaacgctgccgctgagggtggactcgatttcccagggtcccgccgcgggagtctccggcgggcgggcgcgcgcgagccaccgagcgaggtgatagaggcggcggcccaggcgtctgggtcctgctggtcttcgcctttcttctccgcttctaccccgtcggccgctgccactggggtccctggccccaccgacatggcggcggtgttgcagcaagtcctggagcgcacggagctgaacaagctgcccaagtctgtccagaacaaacttgaaaagttccttgctgatcagcaatccgagatcgatggcctgaaggggcggcatgagaaatttaaggtggagagcgaacaacagtattttgaaatagaaaagaggttgtcccacagtcaggagagacttgtgaatgaaacccgagagtgtcaaagcttgcggcttgagctagagaaactcaacaatcaactgaaggcactaactgagaaaaacaaagaacttgaaattgctcaggatcgcaatattgccattcagagccaatttacaagaacaaaggaagaattagaagctgagaaaagagacttaattagaaccaatgagagactatctcaagaacttgaatacttaacagaggatgttaaacgtctgaatgaaaaacttaaagaaagcaatacaacaaagggtgaacttcagttaaaattggatgaacttcaagcttctgatgtttctgttaagtatcgagaaaaacgcttggagcaagaaaaggaattgctacatagtcagaatacatggctgaatacagagttgaaaaccaaaactgatgaacttctggctcttggaagagaaaaagggaatgagattctagagcttaaatgtaatcttgaaaataaaaaagaagaggtttctagactggaagaacaaatgaatggcttaaaaacatcaaatgaacatcttcaaaagcatgtggaggatctgttgaccaaattaaaagaggccaaggaacaacaggccagtatggaagagaaattccacaatgaattaaatgcccacataaaactttctaatttgtacaagagtgccgctgatgactcagaagcaaagagcaatgaactaacccgggcagtagaggaactacacaaacttttgaaagaagctggtgaagccaacaaagcaatacaagatcatcttctagaggtggagcaatccaaagatcaaatggaaaaagaaatgcttgagaaaatagggagattggagaaggaattagagaatgcaaatgaccttctttctgccacaaaacgtaaaggagccatattgtctgaagaagagcttgccgccatgtctcctactgcagcagctgtagctaagatagtgaaacctgggatgaaactaactgagctctataatgcttatgtggaaactcaggatcagttgcttttggagaaactagagaacaaaagaattaataagtacctagatgaaatagtgaaagaagtggaagccaaagcaccaattttgaaacgccagcgtgaggaatatgaacgtgcacagaaagctgtagcaagtttatctgttaagcttgaacaagctatgaaggagattcagcgattgcaggaggacactgataaagccaacaagcaatcatctgtacttgagagagataatcgaagaatggaaatacaagtaaaagatctttcacaacagattagagtgcttttgatggaacttgaagaagcaaggggtaaccacgtaattcgtgatgaggaagtaagctctgctgatataagtagttcatctgaggtaatatcacagcatctagtatcttacagaaatattgaagagcttcaacaacaaaatcaacgtctcttagtggcccttagagagcttggggaaaccagagaaagagaagaacaagaaacaacttcatccaaaatcactgagcttcagctcaaacttgagagtgcccttactgaactagaacaactccgcaaatcacgacagcatcaaatgcagcttgttgattccatagttcgtcagcgtgatatgtaccgtattttattgtcacaaacaacaggagttgccattccattacatgcttcaagcttagatgatgtttctcttgcatcaactccaaaacgtccaagtacatcacagactgtttccactcctgctccagtacctgttattgaatcaacagaggctatagaggctaaggctgcccttaaacagttgcaggaaatttttgagaactacaaaaaagaaaaagcagaaaatgaaaaaatacaaaatgagcagcttgagaaacttcaagaacaagttacagatttgcgatcacaaaataccaaaatttctacccagctagattttgcttctaaacgttatgaaatgctgcaagataatgttgaaggatatcgtcgagaaataacatcacttcatgagagaaatcagaaactcactgccacaactcaaaagcaagaacagattatcaatacgatgactcaagatttgagaggagcaaatgagaagctagctgtcgcagaagtaagagcagaaaatttgaagaaggaaaaggaaatgcttaaattgtctgaagttcgtctttctcagcaaagagagtctttgttagctgaacaaagggggcaaaacttactgctaactaatctgcaaacaattcagggaatactggagcgatctgaaacagaaaccaaacaaaggcttagtagccagatagaaaaactggaacatgagatctctcatctaaagaagaagttggaaaatgaggtggaacaaaggcatacacttactagaaatctagatgttcaacttttagatacaaagagacaactggatacagagacaaatcttcatcttaacacaaaagaactattaaaaaatgctcaaaaagaaattgccacattgaaacagcacctcagtaatatggaagtccaagttgcttctcagtcttcacagagaactggtaaaggtcagcctagcaacaaagaagatgtggatgatcttgtgagtcagctaagacagacagaagagcaggtgaatgacttaaaggagagactcaaaacaagtacgagcaatgtggaacaatatcaagcaatggttactagtttagaagaatccctgaacaaggaaaaacaggtgacagaagaagtgcgtaagaatattgaagttcgtttaaaagagtcagctgaatttcagacacagttggaaaagaagttgatggaagtagagaaggaaaaacaagaacttcaggatgataaaagaagagccatagagagcatggaacaacagttatctgaattgaagaaaacactttctagtgttcagaatgaagtacaagaagctcttcagagagcaagcacagctttaagtaatgagcagcaagccagacgtgactgtcaggaacaagctaaaatagctgtggaagctcagaataagtatgagagagaattgatgctgcatgctgctgatgttgaagctctacaagctgcgaaggagcaggtttcaaaaatggcatcagtccgtcagcatttggaagaaacaacacagaaagcagaatcacagttgttggagtgtaaagcatcttgggaggaaagagagagaatgttaaaggatgaagtttccaaatgtgtatgtcgctgtgaagatctggagaaacaaaacagattacttcatgatcagatcgaaaaattaagtgacaaggtcgttgcctctgtgaaggaaggtgtacaaggtccactgaatgtatctctcagtgaagaaggaaaatctcaagaacaaattttggaaattctcagatttatacgacgagaaaaagaaattgctgaaactaggtttgaggtggctcaggttgagagtctgcgttatcgacaaagggttgaacttttagaaagagagctgcaggaactcgaagatagtctaaatgctgaaagggagaaagtccaggtaactgcaaaaacaatggctcagcatgaagaactgatgaagaaaactgaaacaatgaatgtagttatggagaccaataaaatgctaagagaagagaaggagagactagaacaggatctacagcaaatgcaagcaaaggtgaggaaactggagttagatattttacccttacaagaagcaaatgctgagctgagtgagaaaagcggtatgttgcaggcagagaagaagctcttagaagaggatgtcaaacgttggaaagcacgtaaccagcatctagtaagtcaacagaaagatccagatacagaagaatatcggaagctcctttctgaaaaggaagttcatactaagcgtattcaacaattgacagaagaaattggtagacttaaagctgaaattgcaagatcaaatgcatctttgactaacaaccagaacttaattcagagtctgaaggaagatctaaataaagtaagaactgaaaaggaaaccatccagaaggacttagatgccaaaataattgatatccaagaaaaagtcaaaactattactcaagttaagaaaattggacgtaggtacaagactcaatatgaagaacttaaagcacaacaggataaggttatggagacatcggctcagtcctctggagaccatcaggagcagcatgtttcagtccaggaaatgcaggaactcaaagaaacgctcaaccaagctgaaacaaaatcaaaatcacttgaaagtcaagtagagaatctgcagaagacattatctgaaaaagagacagaagcaagaaatctccaggaacagactgtgcaacttcagtctgaactttcacgacttcgtcaggatcttcaagatagaaccacacaggaggagcagctccgacaacagataactgaaaaggaagaaaaaaccagaaaggctattgtagcagcaaagtcaaaaattgcacacttagctggtgtaaaagatcagctaactaaagaaaatgaggagcttaaacaaaggaatggagccttagatcagcagaaagatgaattggatgttcgcattactgcgctaaagtcccaatatgaaggtcgaattagtcgcttggaaagagaactcagggagcatcaagagagacaccttgagcagagagatgagcctcaagaaccttctaataaggtccctgaacagcagagacagatcacattgaaaacaactccagcttctggtgaaagaggaattgccagcacatcagacccaccaacagccaatatcaagccaactcctgttgtgtctactccaagtaaagtgacagctgcagctatggctggaaataagtcaacacccagggctagtatccgcccaatggttacacctgcaactgttacaaatcccactactaccccaacagctacagtgatgcccactacacaagtggaatcacaggaagctatgcagtcagaagggcctgtggaacatgttccagtttttggaagcacaagtggatccgttcgttctactagtcctaatgtccagccttctatctctcaacctattttaactgttcagcaacaaacacaggctacagcttttgtgcaacccactcaacagagtcatcctcagattgagcctgccaatcaagagttatcttcaaacatagtagaggttgttcagagttcaccagttgagcggccttctacttccacagcagtatttggcacagtttcggctacccccagttcttctttgccaaagcgtacacgtgaagaggaagaggatagcaccatagaagcatcagaccaagtctctgatgatacagtggaaatgcctcttccaaagaagttgaaaagtgtcacacctgtaggaactgaggaagaagttatggcagaagaaagtactgatggagaggtagagactcaggtatacaaccaggattctcaagattccattggagaaggagttacccagggagattatacacctatggaagacagtgaagaaacctctcagtctctacaaatagatcttgggccacttcaatcagatcagcagacgacaacttcatcccaggatggtcaaggcaaaggagatgatgtcattgtaattgacagtgatgatgaagaagaggatgaggaagatgatgatgatgatgaagatgacacagggatgggagatgagggtgaagatagtaatgaaggaactggtagtgccgatggcaatgatggttatgaagctgatgatgctgagggtggtgatgggactgatccaggtacagaaacagaagaaagtatgggtggaggtgaaggtaatcacagagctgctgattctcaaaacagtggtgaaggaaatacaggtgctgcagaatcttctttttctcaggaggtttctagagaacaacagccatcatcagcatctgaaagacaggcccctcgagcacctcagtcaccgagacgcccaccacatccacttcccccaagactgaccattcatgccccacctcaggagttgggaccaccagttcagagaattcagatgacccgaaggcagtctgtaggacgtggccttcagttgactccaggaataggtggcatgcaacagcatttttttgatgatgaagacagaacagttccaagtactccaactcttgtggtgccacatcgtactgatggatttgctgaagcaattcattcgccgcaggttgctggtgtccctagattccggtttgggccacctgaagatatgccacaaacaagttctagtcactctgatcttggccagcttgcttctcaaggaggtttaggaatgtatgaaacacccctgttcctagctcatgaagaagagtcaggtggccgaagtgttcccactactccactacaagtagcagccccagtgactgtatttactgagagcaccacctctgatgcttcggaacatgcctctcaatctgttccaatggtgactacatccactggcactttatctacaacaaatgaaacagcaacaggtgatgatggagatgaagtatttgtggaggcagaatctgaaggtattagttcagaagcaggcctagaaattgatagccagcaggaagaagagccggttcaagcatctgatgagtcagatctcccctccaccagccaggatcctccttctagctcatctgtagatactagtagtagtcaaccaaagcctttcagacgagtaagacttcagacaacattgagacaaggtgtccgtggtcgtcagtttaacagacagagaggtgtgagccatgcaatgggagggagaggaggaataaacagaggaaatattaattaaatggtctgtaaacaataacaactgtgaataagattatcaaatctgttttagtgtaatgattgtcaagtttaaaaacatttttatatataaactggtatactcatgtcaatattctttattaataaaatgtttttcagtgtcaaaaaaaaa

SEQ ID NO: 345 - DNA, 7171 bp, Homo sapiens; identical to SEQ ID NO: 286

SEQ ID NO: 346 - DNA, 7405 bp, Homo sapiens
gctatgccgctgcagggaaaatgctgagccctcccgggccgggtgggcggcggccggcgagggcggcgacggggacccgcttcccgagcgcggcggcggcggccatggcccggctggctgactacttcatcgtggtaggctatgaccacgagaagccaggatcaggagaaggtctggggaaaataatccagagatttccacagaaggactgggatgatacaccttttccacagggaattgagttgttttgtcagcctggcgggtggcagctgtccagagagaggaagcagccaacgttctttgtggttgtcctgacagacattgactcagatcgacattactgctcatgcctaaccttctatgaggcagagatcaatcttcagggaacaaagaaggaagagattgaaggtgaagcaaaagtgtctggtttaattcagcctgcagaagtgtttgctcccaaaagcctggtgttggtatccagattatattatccagaaatttttagggcttgcctgggtttgatctataccgtgtatgtggacagcctgaatgtctccttggaaagtctaattgcaaacctttgtgcctgccttgtcccagcggctggagggtctcagaagctgttttctttgggtgcaggagatagacagttgatccagactcctttacatgatagtcttcctatcacgggcactagtgtggctctcctgttccagcaattgggaattcaaaatgtcctcagcctcttttgtgcagtcctcacagaaaataaggttctcttccattctgcaagtttccagagacttagtgatgcttgtagagccctggaatctttaatgtttcctcttaaatatagttatccttatatccctattctcccggctcagctactggaagttctaagttccccaacgcctttcattattggagtacattctgtctttaaaactgatgtccatgaacttttagatgtaatcatagcagatttggatggaggcactattaaaattcccgaatgtattcacctctcttccctcccagaaccacttctacatcagactcaatcagctctttctttgattttacacccagatttggaagtagcagatcatgcttttcctcctccacgaacagctttatcccactcaaaaatgctggataaagaggtgcgagccgttttccttagattatttgcacaactcttccaaggatatagatcctgcctgcaacttataagaattcatgcagagccagtaatacatttccacaagacagcattcttggggcagcgtggtttggtcgagaatgatttcctcactaaagtactcagtggaatggcatttgcaggttttgtttcagaaagaggtcctccttatagatcttgtgatctctttgatgagttggtagcctttgaagtagagagaattaaagttgaagaaaataacccagtgaagatgataaagcatgtcagggaacttgctgagcaactattcaaaaatgagaatccaaatcctcatatggcattccagaaagttccacggccaacagaaggatcccatttgcgagttcatattcttcctttcccagagattaatgaagcccgggttcaggaattaatacaggaaaatgttgctaagaaccagaatgcacctcctgccacacgaatagaaaagaaatgtgttgtgccagcaggtccacctgttgtttcgataatggacaaggtgacgacagttttcaacagtgcacaaagactagaagttgtcagaaactgtatctcattcatatttgaaaataaaattttggaaactgaaaagacccttcctgctgcactcagagcccttaaaggaaaggcagcaagacagtgtctcactgatgaattgggtttgcatgtccagcaaaaccgggcaatattagaccatcaacagtttgactacataataaggatgatgaattgtactctacaggattgttcaagtttagaagaatacaacattgccgcagcattactccctttgaccagtgctttctataggaaacttgcccctggagtcagccagtttgcttacacgtgtgtacaagaccaccccatttggacaaatcagcaattttgggagacaaccttttacaatgcagtgcaggaacaggttcgctccctttatctctcagccaaggaagacaatcatgccccgcatctgaagcaaaaggataagcttcctgatgaccattatcaggagaagacagcaatggacctggcagctgagcaactacgcctttggcctaccctgagcaagtcaactcagcaagagctagtgcaacatgaggaaagcactgtctttagtcaggccattcactttgcaaacctcatggtgaacctgctagttccactcgacacaagtaaaaacaagctcctaagaacatcagcgccaggtgactgggagagcggaagcaacagcattgtcacaaacagtattgcaggaagtgtagctgagagctatgatacagagagtgggtttgaagattcagagaatactgacattgccaattctgttgtgcggttcattacccgatttattgacaaagtttgtacagagagtggagttactcaggatcacatcaagagccttcattgcatgataccaggaattgtagctatgcacattgagaccctagaagcagtacatcgagaaagcagaagacttccgcctattcagaagcccaagattcttagacctgctctgctgccaggagaagaaattgtctgtgagggtcttcgagtcttgctggatcctgatggaagagaagaagctactggaggtcttcttggaggccctcagctcctgccagcagaaggagccttgttcctcaccacatacagaattctcttcagaggaacaccccatgatcagttagtgggtgagcagacagttgtgcggagctttcccattgcctccatcaccaaggagaagaagattacaatgcagaaccagctacagcagaacatgcaagaaggactgcagatcacatcagcatcttttcagttgattaaggtagcatttgatgaagaagtcagtccagaagtagtagagatctttaagaaacagctgatgaagttccgttatcctcagtccattttcagtacctttgcttttgctgctggacaaactaccccacaaataattttaccaaaacagaaggaaaagaacacttcttttcgtaccttctcaaaaacaattgtgaaaggtgccaaaagggcagggaaaatgacaattgggcggcaatatttactgaagaagaagacagggacaattgtggaagaaagagtaaatcgtcctggatggaatgaagatgatgatgtatctgtttcagatgagagtgagctccccacaagtaccaccctgaaggcctccgagaagtctacaatggaacagttggtggaaaaagcttgtttcagagactatcagcgtttaggtttaggaaccataagtggcagctcttcccgttcaagacccgagtattttagaattactgcctccaacaggatgtattcactctgccggagctatcctggccttttagtcgtacctcaagctgtacaggacagtagtttaccaagagtagctcgctgctatcgacacaatcgcctgcctgttgtatgttggaagaactcaagaagtggtactctgctcctccgatctggaggattccatgggaagggagtcgttggtcttttcaaatctcagaactcccctcaggccgctcctacctcctctttagaatcttccagtagcatagaacaagagaaatacttgcaagccttactgaatgctgtttctgtccatcagaaactcagaggcaacagcactcttactgtcaggccagcctttgctctatctccaggtgtgtgggcaagtcttcgctctagcactcgcttgatcagctctccaacatccttcattgatgttggcgcccggctggcaggcaaggatcactcggcctccttcagtaacagcagctacctacaaaaccagctcttgaaacggcaagcagccctttacatatttggtgaaaagtcgcaactaaggaacttcaaggtagaatttgctttaaattgtgagtttgttcctgttgaatttcatgaaatccggcaagtgaaagccagttttaagaagctgatgagggcttgtatcccaagcaccatccctactgactcagaagtgaccttcctgaaagcgctgggagattctgagtggttcccacagcttcacaggataatgcagctggctgtggttgtatcagaagtacttgagaatggttcctcagttttggtctgtttggaggaaggctgggacatcactgcacaagtgacatccctggttcagttactcagtgatcccttttataggacacttgaaggcttccagatgttggttgaaaaagagtggctctcttttggtcacaaattcagtcagaggagcagcttgaccctcaactgtcaggggagtggttttgctccagtcttcttacagttcttagactgtgtacaccaggttcacaaccagtatccaactgagtttgaattcaatctctattacttaaagttcttggctttccactatgtgtctaatcgctttaaaacatttctcctggattcagactatgaaagattagagcacggaactttatttgatgataaaggagaaaagcatgccaaaaaaggagtctgtatttgggaatgtattgacagaatgcacaagaggagtcccattttctttaattatttatattcaccattggaaatagaggctctaaagcccaatgtaaacgtctctagcctcaagaagtgggattactacatagaagagaccctgtccacaggcccttcctatgactggatgatgctaacccccaagcacttcccctccgaagactctgacctggctggagaagctgggccacggagccagaggagaacagtgtggccatgctatgatgatgtcagctgtactcagcctgatgctctcaccagccttttcagtgaaattgaaaaattggagcacaaattgaaccaagcccctgagaagtggcagcagctgtgggaaagggtaaccgtggaccttaaagaagaaccaagaacagatcgctcccaaagacacctgtcgagatccccaggaattgtgtctaccaacctaccttcctatcagaagaggtctctgctacatctcccagacagcagcatgggggaggaacagaattccagcatctccccatccaatggagtggagcgaagagcagccacgctctatagccagtatacatccaagaatgatgaaaacaggtcctttgagggaacactttataaaagaggggctttgctgaaaggttggaagccccgttggtttgttttggatgtaacaaaacatcagctgcgctactatgactcaggtgaggacacaagctgtaaaggccacattgatctggctgaagtagaaatggtcatccctgctggccccagcatgggagccccaaagcacacaagtgacaaggctttctttgatctcaagaccagcaaacgtgtgtataacttctgcgcccaggatggacagagtgcccagcaatggatggacaagatccagagttgtatctctgatgcctgatgcccatggtcaacccacgcagaagaaacagaagaactcatgctgccagatagatagaaaaagaagcatggatccttgaggagctgacaacaagttatcccagggcctgaggttctcctgcccagtcccctcttgcaggggttgctatatctacttaacctgaataggtgtttcacacaggtctggtcaacagccccatgcactccctgtatcttgcactaaatttttctaacagggtcttagtggttaatgatcagaagatgtctcctgagccaactgtgaacctcacccaggcaaaatggctaccacctacttgggtccttcttcatgaaagctatagatccttttttgttctctgaggtcataatttcctcggagacctgtttaacaagcaaaaatcaaaaccctccaagattgtctcatattctacctggactaggtttcctatgagagacatctacttgtaatgcctgacctttgagatgctcagttctctggtgctgccaaaagatgcttccatggtccgtgctctgccagtggggttcacaacaagagacgtcattgttcagtagcaggcaaagagggagcacacagcattattctgatggaaaaagattatccagggaatggtacaacaatgaccagcccaatgcaggaaaacactacttccaaaacactgaattctctagaccagaggtgctctgaggatccagggccttgtgttcttatgtatcttctgcttcctgacagcttctttttcaaaataacatgcaaaaaaagctgaatgcactaactcacaaaacaaacacttgcactgaattcccaatgaagtgaagatgttggaaagacagaggccagctatttaggaccatacgcacctgtgacaagggctgtgttgaccacagtcacactgtggcatgactggatacccaaactacacttctacacatgaaaagtaagaactgtctttagattttctttactttgataacttgtgattgtttagcttaagacccaagaaatgctgtttgctcatggtaaacagaaacagcatcttcgctacaaccactgacaccagctggcgtcataggtagctagatcattgcatttgttttgaaatgttaatatgttaaatactaaactaatatttcaaaaatgtgtatatatgatttctatatccttgtttttcagatagcctgcttataatttaatataaattaactgatgcattcataagatttcaataatgaaatggttcccttttaaaaaataaaaatactttgtagattaaaaataaatcagaatttcaaatttaaaattgtccacacactaggaaatagaactgtgttaatatataagaaatctggggataattaagaatgaaggacttttctatcatttccattttataaattgccacctgtgaaaatggtttttgcacattatttgtatttttctttgtatatgaaataattttttgtactttgtaaaatatggagcccattgtaccttcagctatttgagactatacacagtgcttcttttgtaactggattactttaactttcgtgaaggcattacattgcctcacattcactaaccaccttgaattaaatttatttcttaagaaaaagcatccctcatttactgtgaactaaagttcattctgtagtgcacagcattcaggagggtaacactcaggattcatacatgggactaaaggttcaagaataaaacaaagcatgacccac

SEQ ID NO: 347 - DNA, 8439 bp, Homo sapiens; identical to SEQ ID NO: 208

SEQ ID NO: 348 - DNA, 3627 bp, Homo sapiens
atggagcggctgcgggacgtgcgggagcggctgcaggcgtgggagcgcgcgttccgacggcagcgcgggcggcgaccgagccaggacgacgtggaggcggcgccggaggagacccgcgcgctctaccgggagtaccgcactctgaagcgtaccacgggccaggccggcggcgggctccgcagctccgagtcgctccccgcggcggccgaagaggcgccagagccccgctgctgggggccccatctgaatcgggctgcgaccaagagtccacagcctacgccagggcggagccgccagggctcggtgccggactacgggcagcggctcaaggccaatctgaaaggcaccctgcaggccggaccagccctgggccgcagaccgtggcctctaggaagagcctcatctaaggcatccaccccaaagcccccaggtacagggcctgtcccctcctttgcagaaaaagtcagtgatgagcctccacagctccctgagccccagccaaggccaggccggctccagcatctgcaggcatccctgagccagcggctgggctccctagatcctggctggttacagcgatgtcacagtgaggtcccagattttctgggggcccccaaagcctgcaggcctgatctaggctcagaggaatcacaacttctgatccctggtgagtcggctgtccttggtcctggtgctggctcccagggcccagaggcttcagccttccaagaagtcagcatccgtgtggggagcccccagcccagcagcagtggaggcgagaagcggagatggaacgaggagccctgggagagccccgcacaggtccagcaggagagcagccaagctggacccccatcggagggggctggggctgtagcagttgaggaagaccctccaggggaacctgtacaggcacagccacctcagccctgcagcagcccatcgaaccccaggtaccacggactcagcccctccagtcaagctagggctgggaaggctgagggcacagcccccctgcacatcttccctcggctggcccgccatgacaggggcaattacgtacggctcaacatgaagcagaaacactacgtgcggggccgggcactccgtagcaggctcctccgcaagcaggcatggaagcagaagtggcggaagaaaggggagtgttttgggggtggtggtgccacagtcacaaccaaggagtcttgtttcctgaacgagcagttcgatcactgggcagcccagtgtccccggccagcaagtgaggaagacacagatgctgttgggcctgagccactggttccttcaccacaacctgtacctgaggtgcccagcctggaccccaccgtgctgccactctactccctggggccctcagggcagttggcagagacgccggctgaggtgttccaggccctggagcagctggggcaccaagcctttcgccctgggcaggagcgtgcagtcatgcggatcctgtctggcatctccacgctgctggtgctgcctacaggtgccggcaagtccctgtgctaccagctcccagcgctgctctacagccggcgcagcccctgcctcacgttggtcgtctctcccctgctgtcactcatggatgaccaggtgtctggcctgccaccgtgtctcaaggcggcctgcatacactcgggcatgaccaggaagcaacgggaatctgtcctgcagaagattcgggcagcccaggtacacgtgctgatgctgacacctgaggcactggtgggggcgggaggcctccctccagccgcacagctgcctccagttgcttttgcctgcattgatgaggcccactgcctctcccagtggtcccacaacttccggccctgctacctgcgcgtctgcaaggtgcttcgggagcgcatgggcgtgcactgcttcctgggcctcacagccacagccacacgccgcactgccagtgacgtggcacagcacctggctgtggctgaagagcctgacctccacgggccagccccagttcccaccaacctgcacctttccgtgtccatggacagggacacagaccaggcactgttgacgctgctgcaaggcaaacgttttcaaaacctcgattccattatcatttactgcaaccggcgcgaggacacagagcggatcgctgcgctcctccgaacctgcctgcacgcagcctgggtcccagggtctggaggtcgtgcccccaaaaccacagccgaggcctaccacgcgggcatgtgcagccgggaacggcggcgggtacagcgagccttcatgcagggccagttgcgggtggtggtggccacggtggcctttgggatggggctggaccggccagatgtgcgggctgtgctgcatctggggctgcccccaagcttcgagagctacgtgcaggccgtgggccgggccgggcgtgacgggcagcctgcccactgccacctcttcctgcagccccagggcgaagacctgcgagagctgcgcagacatgtgcacgccgacagcacggacttcctggctgtgaagaggctggtacagcgcgtgttcccagcctgcacctgcacctgcaccaggccgccctcggagcaggaaggggccgtgggtggggagaggcctgtgcccaagtacccccctcaagaggctgagcagcttagccaccaagcagccccaggacccagaagggtctgcatgggccatgagcgggcactcccaatacagcttaccgtacaggctttggacatgccggaggaggccatcgagactttgctgtgctacctggagctgcacccacaccactggctggagctgctggcgaccacctatacccattgccgtctgaactgccctgggggccctgcccagctccaggccctggcccacaggtgtccccctttggctgtgtgcttggcccagcagctgcctgaggacccagggcaaggcagcagctccgtggagtttgacatggtcaagctggtggactccatgggctgggagctggcctctgtgcggcgggctctctgccagctgcagtgggaccacgagcccaggacaggtgtgcggcgtgggacaggggtgcttgtggagttcagtgagctggccttccaccttcgcagcccgggggacctgaccgctgaggagaaggaccagatatgtgacttcctctatggccgtgtgcaggcccgggagcgccaggccctggcccgtctgcgcagaaccttccaggcctttcacagcgtagccttccccagctgcgggccctgcctggagcagcaggatgaggagcgcagcaccaggctcaaggacctgctcggccgctactttgaggaagaggaagggcaggagccgggaggcatggaggacgcacagggccccgagccagggcaggccagactccaggattgggaggaccaggtccgctgcgacatccgccagttcctgtccctgaggccagaggagaagttctccagcagggctgtggcccgcatcttccacggcatcggaagcccctgctacccggcccaggtgtacgggcaggaccgacgcttctggagaaaatacctgcacctgagcttccatgccctggtgggcctggccacggaagagctcctgcaggtggcccgctga

SEQ ID NO: 349 - DNA, 3233 bp, Homo sapiens
gccgggagcttccctgatggtgccgccgcctccgagccggggaggagctgccaggggccagctgggcaggagcctgggtccgctgctgctgctcctggcgttgggacacacgtggacctacagagaggagccggaggacggcgacagagaaatctgctcagagagcaaaatcgcgacgactaaatacccgtgtctgaagtcttcaggcgagctcaccacatgctacaggaaaaagtgctgcaaaggatataaatttgttcttggacaatgcatcccagaagattacgacgtttgtgccgaggctccctgtgaacagcagtgcacggacaactttggccgagtgctgtgtacttgttatccgggataccgatatgaccgggagagacaccggaagcgggagaagccatactgtctggatattgatgagtgtgccagcagcaatgggacgctgtgtgcccacatctgcatcaataccttgggcagctaccgctgcgagtgccgggaaggctacatccgggaagatgatgggaagacatgtaccaggggagacaaatatcccaatgacactggccatgagaagtctgagaacatggtgaaagccggaacttgctgtgccacatgcaaggagttctaccagatgaagcagaccgtgctgcagctgaagcaaaagattgctctgctccccaacaatgcagctgacctgggcaagtatatcactggtgacaaggtgctggcctcaaacacctaccttccaggacctcctggcctgcctgggggccagggccctcccggctcaccaggaccaaagggaagcccaggcttccccggtatgccaggccctcctgggcagcccggcccacggggctcaatgggacccatgggaccatctcctgatctgtcccacattaagcaaggccggaggggccctgtgggtccaccaggggcaccaggaagagatggttctaagggggagagaggagcgcctgggcccagagggtctccaggaccccctggttctttcgacttcctgctacttatgctggctgacatccgcaatgacatcactgagctgcaggaaaaggtgttcgggcaccggactcactcttcagcagaggagttccctttacctcaggaatttcccagctacccagaagccatggacctgggctctggagatgaccatccaagaagaactgagacaagagacttgagagcccccagagacttctacccatagcacatcccaacaccgtcacgccaaaggaagagaaagatcaactcacctgcagttaaaccatctaaagagaagaaagaccactggagacctagaaaacatacatttttctcttctcttctcctgacgtctctccactcctcttcttccaaatacgatgctattttcagagtcccctcctaggcctgcagacatgagggagtgaatgattgatttacctgcttctcactaagagtccattggggtggtttgcattgtaacttttcttttacatcctatttttccaggaactttggatttaagtactctcacagtgtcttaaatcataaattcttgaagttaaatttggcagagtatcaaaagggggaaaatgacaaagtgagctctaagaaaatgtgaggctacttctaagatgtgtgttcacaatagaccataactcctctagtatcaaaattggggctcttcagttaaaaaggggtggggaggacaaacgtgtcgatgtgctttggtggagaattttttccttgtgcttctagtagactttaaatattgtatccctttgtcaaaccttgtttcccaaattcaattaaagagaggagagaattgaatggcgtttagagaagatagaaaagaatcacagtcatatatttactgttatatagattgccacattctaaaattcaaatacggtgcttaaggtttcatgccatgcttatctgtaagtatcctatttagggaagaagattaaactctcttttcaaaaaaacaaagtgaaatgcctggattcacattaaaacaatgggctctcgtttgctataatattttaaagctgtttaatcaacagtggagtctgctctataaatatagattatttgttcaataaactggctgagcttagagagaggtgcagaattcctggttctgagcaggtgcccagaaggtaccattaggtgccatgatccaggctgaaccaatatacagtggggctgaagtctgcaaggaggttgctggcttgggctgacctcactaatgccatcagcagcggtaggtaaattttttctccttgggtattacaagtttttgtctggagccaaccaagcttgccaccaacatattgagagtaatacactattgaaagttatcttggatggggagaaaaaaaaatagtggttttccttgtttgcaaaaacttccttcctattctcattttttcttaattttctttaatttagtccaagttccagttcttttaggccttctctttgatttattttcccctgcatgtgagaagcagttcagaaaaaggtctatatctccacctcctagtgagttagagtgttttctcagagcacctctgggtggcaaagggaagcatgttcctgccaaggtttgctgtggattcagaagcaccaggagcaagagaccagaaggatgatctgctcctttgtaacgttgttgagggccctcttgtttccaatgagcagcttataggttactcacagtccactttctcactggacacacaaagtggctctttatctacctttgcgggagattttcactctcctgcaaatgatcgttctcacactcatattagctcatgttggaatttcccatcctgccatgtcctttcccatttctttttggcttttttgcctccaccttttagcccacatcatttaactccactactgtgaaagcttgcttaaagaaaatccctcttggccgggtgtggtagcccacgcctctaatcccagcactttgggaggctgaggcggggagatcacaaggtcaggagatcgagaccagcctgaccaacatggtgaaaccctgtctctactaaaaatacaaaaattagctgggcgtgttggcacacacctgtaatcccagctactcaggaggctgaggcaggagaattactttaacctgcggggggagcctagattgcgctactgcactccagcctaggcaacagagggagactctgtctcattaaaaa

SEQ ID NO: 350 - DNA, 3768 bp, Homo sapiens
gcttgggtggcaaccagaactagggagctggtggagaaggtggcggccgctggaaggaggcccgggaggtggctgaggggtccaggcggcgggacgactctggccttttgaagaccgggaggaaactctacagagaagaatgtcagatgcagcagaagctccccgagaagcaacaggagaaaatggagaaacagaaatgaaagaagaggaggaacctaatccaaattataaagaagtagaagatccacaacaggaatcaaaagatgacacaatagcatggagagagtctcaggaggaggagaggaaaacgggcgaggaggaaggggaggaggaggagaaagaggaggaggggaaggaggacaaaaagattgtcatggaagaaactgaggaaaaggctggagaagtccaagagaaggaggcttcaggaatacaggaagaaaccacagtagagccccaagaagtcacagcgtccatgatccgtttggagacacagattactgattcccagtcaatcacatcaggaattttcccaaaaacccaaagaggtagcaagtcaaagctttccttacaattggaggatgcagaaacagatgagcttttaagagacctgagcacacaaattgaatttcttgatttggatcaaatcagtcctgaggaacaacagattagttcccctgaaaggcagccctcaggagagcttgaggagaaaaccgaccggatgccccaagatgaactgggacaagaaagaagggacttggagccagaaaacagagaggagggacaagaaaggagagtatccgacatccagtccaaagcagggatctcccgggagtcactggtgtccagcaccacagaggacattctgtttcaaaaggataaaagcaccccggtgtatcccttgaccatgacctggtcgtttggatggaacagttctcttcctgtttactatattcgagaggaaaggcagagagttcttctgtatgtttgtgctcacactgcgatcatctacaacgtgttcaggaacaatcaataccaccttcagggccacgccaatattatctcctgcctctgcgtcagtgaagacaggcggtggatcgccacagcagacaaagggccagactgcctggtgattatatgggactccttcacaggtattcctgtgcacacaatatttgacagctgccctgaagggaatggcatcatggccatggccatgacccacgacgccaagtatctggcaaccatctcagatgctgaagtccagaaggtatgcatctggaagtggactttggcagtggaaacgccagcatgcactctcgaactccccacagagtacggtgttcagaactacgttacttttaacccaacaaataataaagaattggtgagcaatagtaaaacacgggcaatatattatgcatggtatgaagagagggatacactggctcacagtgccccacttttaactgaaaaaaccttcaacaagcttgtgggaaagtttagccagtccatctttcacttgaatttaacacaaatactctcagccacaatggaagggaagctggttgtctgggacatacaccgcccaccctcatctgcctccacctttttgggctttccctatatcaagccttgtaaattggttcatttgcagaaagagggtatcacggtacttaccacaattgatagctacattgtcacaggtgacattaaggggaacattaagttctatgatcacaccctgtctattgttaactggtacagtcacttgaaactgggcgccataagaactctgtccttttcaaagaccccagcaactcctcctactgaaaaatcaaactatcctcctgactgcactttaaaaggtgacctttttgtcttaaggaattttatcattggaacatctgatgccgcggtgtaccacttaacaacagatgggaccaaacttgagaagttatttgtagagcccaaggatgccatttgtgccatctcctgccacccatatcaacccctcattgccatcgggagcatctgtgggatgatcaaagtgtggaattatgaaaacaaacaatatcttttcagcagggtttttgagaaggggcttggagtccagagtctgacctacaaccccgaaggagcccttcttggagctggctttacagaggggacagtttacattcttgatgcaatgtctttagaaaatgaaagcccagagcctttcaaatattccagaaccagtgtgactcatataagcttttcccatgactcccagtatatggcaactgctgatagaagttttactgtggctgtttacatgctggtggtcagaaatggacagagggtctgggagtacttagcaagacttcgctctcatcgcaaaagcattcgaagtctcctgtttggggtttacctggacagcaatgagcctagactgctgagccttgggacagacaggctcttgatagagtatgatcttctcaggagctacaaagaccacctggaagtcctggacattcaccacaccgaccagggctgctatcccacctgcatggtctggtacccaccactcaccagggaactcttcctgcttatttgcaacagtggctacaaagtgaagctttttaatgctactaccaaaatgtgcagaaagacgcttctggggccagcttatggttcccctattgagcagacacaagtcctcccagtgagaagcatggcggagctacagaaacgctacttggtgtttattaacagagacaaggtgggacttcagatcttaccagttgacggcaatccacataagacatctgctattgtttgccacccgaacggggtggccggcatggccgtttcctatgatggctgctacgccttcactgcgggagggcacgatcgctcggtggtgcagtggaaaatcaccttaagtgtcctggaggcagcggtttctcttgggggtgaagacttgaccccattctatggtctgctgtctggtggccgggaaggaaaattctacagggagctagaagactacttctactattctcagctccgcagtcaaggcatcgacacaatggagaccagaaaggtgtcagaacacatttgcctgtcagagcttccttttgtcatgagagcaattggcttttacccatctgaagagaagattgatgatatatttaacgaaatcaaatttggtgaatatgtggacactggaaagctaatcgacaagatcaacttaccagatttcctaaaagtgtaccttaaccacaagccaccttttggtaacaccatgagtggcatccacaagagctttgaggtgctcggttataccaactccaaagggaaaaaggccattcgaagagaggacttcctgagactgctcgttactaaaggtgagcatatgacggaggaggagatgttggattgctttgcttcactgtttggcctgaatcccgagggatggaaatccgagcctgcaacctgctccgtcaaaggttcagaaatttgccttgaagaagaacttccagacgaaatcactgcagaaatattcgcgactgaaattcttggcttaaccatttcagaagattccggccaggatggtcagtgaagttaccaggaatgtttaaagcacaaaggactttgggtgtgtgtgcatgcacatgtgtgtgttttccatgaggcactgctttttatgcatttccctcccccctctcatctttagaacatttagacattaaagcaagtttctggtgagcaaaaaaaaaaaaaaaa

SEQ ID NO: 351 - DNA, 4532 bp, Homo sapiens
agtgacttgagggaggcgctgcgactgacaagcggctctgcccgggaccttctcgctttcatctagcgctgcactcaatggaggggcgggcaccgcagtgcttaatgctgtcttaactagtgtaggaaaacggctcaacccaccgctgccgaaatgaagtataagaatcttatggcaagggccttatatgacaatgtcccagagtgtgccgaggaactggcctttcgcaagggagacatcctgaccgtcatagagcagaacacagggggactggaaggatggtggctgtgctcgttacacggtcggcaaggcattgtcccaggcaaccgggtgaagcttctgattggtcccatgcaggagactgcctccagtcacgagcagcctgcctctggactgatgcagcagacctttggccaacagaagctctatcaagtgccaaacccacaggctgctccccgagacaccatctaccaagtgccaccttcctaccaaaatcagggaatttaccaagtccccactggccacggcacccaagaacaagaggtatatcaggtgccaccatcagtgcagagaagcattgggggaaccagtgggccccacgtgggtaaaaaggtgataacccccgtgaggacaggccatggctacgtatacgagtacccatccagataccaaaaggacgtctatgatatccctccttctcataccactcaaggggtatacgacatccctccctcatcagcaaaaggccctgtgttttcagttccagtgggagagataaaacctcaaggggtgtatgacatcccgcctacaaaaggggtatatgccattccgccctctgcttgccgggatgaagcagggcttagggaaaaagactatgacttcccccctcccatgagacaagctggaaggccggacctcagaccggagggggtttatgacattcctccaacctgcaccaagccagcagggaaggaccttcatgtaaaatacaactgtgacattccaggagctgcagaaccggtggctcgaaggcaccagagcctgtccccgaatcacccacccccgcaactcggacagtcagtgggctctcagaacgacgcatatgatgtcccccgaggcgttcagtttcttgagccaccagcagaaaccagtgagaaagcaaacccccaggaaagggatggtgtttatgatgtccctctgcataacccgccagatgctaaaggctctcgggacttggtggatgggatcaaccgattgtctttctccagtacaggcagcacccggagtaacatgtccacgtcttccacctcctccaaggagtcctcactgtcagcctccccagctcaggacaaaaggctcttcctggatccagacacagctattgagagacttcagcggctccagcaggcccttgagatgggtgtctccagcctaatggcactggtcactaccgactggcggtgttacggatatatggaaagacacatcaatgaaatacgcacagcagtggacaaggtggagctgttcctgaaggagtacctccactttgtcaagggagctgttgcaaatgctgcctgcctcccggaactcatcctccacaacaagatgaagcgggagctgcaacgagttgaagactcccaccagatcctgagtcaaaccagccatgacttaaatgagtgcagctggtccctgaatatcttggccatcaacaagccccagaacaagtgtgacgatctggaccggtttgtgatggtggcaaagacggtgcccgatgacgccaagcagctcaccacaaccatcaacaccaacgcagaggccctcttcagacccggccctggcagcttgcatctgaagaatgggccggagagcatcatgaactcaacggagtacccacacggtggctcccagggacagctgctgcatcctggtgaccacaaggcccaggcccacaacaaggcactgcccccaggcctgagcaaggagcaggcccctgactgtagcagcagtgatggttctgagaggagctggatggatgactacgattacgtccacctacagggtaaggaggagtttgagaggcaacagaaagagctattggaaaaagagaatatcatgaaacagaacaagatgcagctggaacatcatcagctgagccagttccagctgttggaacaagagattacaaagcccgtggagaatgacatctcgaagtggaagccctctcagagcctacccaccacaaacagtggcgtgagtgctcaggatcggcagttgctgtgcttctactatgaccaatgtgagacccatttcatttcccttctcaacgccattgacgcactcttcagttgtgtcagctcagcccagcccccgcgaatcttcgtggcacacagcaagtttgtcatcctcagtgcacacaaactggtgttcattggagacacgctgacacggcaggtgactgcccaggacattcgcaacaaagtcatgaactccagcaaccagctctgcgagcagctcaagaccatagtcatggcaaccaagatggccgccctccattaccccagcaccacggccctgcaggaaatggtgcaccaagtgacagacctttctagaaatgcccagctgttcaagcgctctttgctggagatggcaacgttctgagaagaaaaaaaagaggaaggggactgcgttaacggttactaaggaaaactggaaatactgtctggtttttgtaaatgttatctatttttgtagatattttatataaaaatgaaatattttaacattttatgggtcagtcaactttcagaaattcagggagctggagagggaaatctttttttttccccctgagtggttcttatgtacatagaggtatctgagacataaactgtacagaaaacttgtccacgtgcttttgtatgcccatgtattcatgtttgtttgtagatgtttgtctgatgcatttcattaaaaaaaaaaccatgaattacgaagcaccttagtaagcacctcctaatgctgcattttttttgttgttgttaaaaacataccagctggttataatattgttctccacgtccttgtgatgattctgagcctggcactcccaaatctgggaagcatagtttatttgcaagtgttcaccttccaaatcatgaggcatagcatgacttattcttgtttggaaaactcttttcaaaactgaccatcttaaacacatgatggccaagtgcccaaaagccctcttgcggagcaaatttcagaatatatatgtggatccaagctctgatagttcaggtgctggagggaagagagacctgtgtgtttagaggccaggaccacagttaggattgggttgtttcaatactgagagacagctacaataaaaggagagcaattgcctccctggggctgttcaatcttctgcatttgtgagtggttcagtcatgaggttttccaaaagatgtttttagagttgtaaaaaccatatttgcagcaaagatttacaaaggcgtatcagactatgattgttcaccaaaataggggaatggtttgatccgccagttgcaagtagaggcctttctgactcttaatattcactttggtgctactacccccattacctgagggaaactggccaggtccttgatcatggaactatagagctaccaggacatatcctgctctctaagggaatttattgctatcttgcaccttctttaaaactcacatatgcagacctgacactcaagagtggctagctacacagagtccatctaatttttgcaacttcctgtggccagtgtgtataaccccttccactatctcacagatagtcacagcgtccattccatagtctgtctcctcacatctgttagtattgacacagcacagacaccacaagccatcaggttcttcatggggcaggtgaaatacttctaccccatgggtaaatgtattcacatattaccaagagaagaagcacattatctatgatcttttggcccagttcttatttagcatttttattccagcctacttggaaacatgtttttatttgcaatatatgcctgactgaattaagcttgcttgttttaaacaaccaaatcattggaacagaaaaggatttaaaaaacaagaatgcatgatctcagagtgattaaaaaaaaatcagtggaaataaatgatcatagaaggtgcttttcaaaacaactgctattataattctcaaagtcctactctgccaaaagaagattaaaagtcatacattacattacaaggaaatgttcatgtgggaagagggttgctgaaaatcaacaacgcttgaagttaaaaagtgtgtctttgtagatttcattgtataatgtgtatttcttaggagatggctgacttgattgatctacgctaagtggagacatttcacatttttaaaaccaaatgttcaatctgtattactctttgccgtcttgtatgtagaggctatttttaaatcattaaatttttagatctctgttttcaaaaaaaaaaaaaaa

SEQ ID NO: 352 - DNA, 2397 bp, Homo sapiens
cccccgagccgcgccgagtctgccgccgccgcagcgcctccgctccgccaactccgccggcttaaattggactcctagatccgcgagggcgcggcgcagccgagcagcggctctttcagcattggcaaccccaggggccaatatttcccacttagccacagctccagcatcctctctgtgggctgttcaccaactgtacaaccaccatttcactgtggacattactccctcttacagatatgggagacatgggagatccaccaaaaaaaaaacgtctgatttccctatgtgttggttgcggcaatcagattcacgatcagtatattctgagggtttctccggatttggaatggcatgcggcatgtttgaaatgtgcggagtgtaatcagtatttggacgagagctgtacatgctttgttagggatgggaaaacctactgtaaaagagattatatcaggttgtacgggatcaaatgcgccaagtgcagcatcggcttcagcaagaacgacttcgtgatgcgtgcccgctccaaggtgtatcacatcgagtgtttccgctgtgtggcctgcagccgccagctcatccctggggacgaatttgcgcttcgggaggacggtctcttctgccgagcagaccacgatgtggtggagagggccagtctaggcgctggcgacccgctcagtcccctgcatccagcgcggccactgcaaatggcagcggagcccatctccgccaggcagccagccctgcggccccacgtccacaagcagccggagaagaccacccgcgtgcggactgtgctgaacgagaagcagctgcacaccttgcggacctgctacgccgcaaacccgcggccagatgcgctcatgaaggagcaactggtagagatgacgggcctcagtccccgtgtgatccgggtctggtttcaaaacaagcggtgcaaggacaagaagcgaagcatcatgatgaagcaactccagcagcagcagcccaatgacaaaactaatatccaggggatgacaggaactcccatggtggctgccagtccagagagacacgacggtggcttacaggctaacccagtggaagtacaaagttaccagccaccttggaaagtactgagcgacttcgccttgcagagtgacatagatcagcctgcttttcagcaactggtcaatttttcagaaggaggaccgggctctaattccactggcagtgaagtagcatcaatgtcctctcaacttccagatacacctaacagcatggtagccagtcctattgaggcatgaggaacattcattctgtattttttttccctgttggagaaagtgggaaattataatgtcgaactctgaaacaaaagtatttaacgacccagtcaatgaaaactgaatcaagaaatgaatgctccatgaaatgcacgaagtctgttttaatgacaaggtgatatggtagcaacactgtgaagacaatcatgggattttactagaattaaacaacaaacaaaacgcaaaacccagtatatgctattcaatgatcttagaagtactgaaaaaaaaagacgtttttaaaacgtagaggatttatattcaaggatctcaaagaaagcattttcatttcactgcacatctagagaaaaacaaaaatagaaaattttctagtccatcctaatctgaatggtgctgtttctatattggtcattgccttgccaaacaggagctccagcaaaagcgcaggaagagagactggcctccttggctgaaagagtcctttcaggaaggtggagctgcattggtttgatatgtttaaagttgactttaacaaggggttaattgaaatcctgggtctcttggcctgtcctgtagctggtttattttttactttgccccctccccactttttttgagatccatcctttatcaagaagtctgaagcgactataaaggtttttgaattcagatttaaaaaccaacttataaagcattgcaacaaggttacctctattttgccacaagcgtctcgggattgtgtttgacttgtgtctgtccaagaacttttcccccaaagatgtgtatagttattggttaaaatgactgttttctctctctatggaaataaaaaggaaaaaaaaaaggaaactttttttgtttgctcttgcattgcaaaaattataaagtaatttattatttattgtcggaagacttgccacttttcatgtcatttgacattttttgtttgctgaagtgaaaaaaaaagataaaggttgtacggtggtctttgaattatatgtctaattctatgtgttttgtctttttcttaaatattatgtgaaatcaaagcgccatatgtagaattatatcttcaggactatttcactaataaacatttggcatagat

SEQ ID NO: 353 - DNA, 3914 bp, Homo sapiens
cctttcctcactgcacgctcttgcccctcctcttttctctcctgcccgtgttcttcccgccgcctgacctggcccgcccgcctttccagtctggccgggcgggggcctgaagcacggcggctcgggccgtgggaccgtgttcacaccctttccagaaattcttggctggtaaccgcgaaaccgactggagcaggagctgggagaactggagaaaactgctctaatctcacttgactccagctaggagctgatgctgcatcgtaataacatttgcagagcgctttcacaggcgctggagtgacttgtctgagattcctccagaactgagccctttgttggaaccataccccagcccatggtcccatgactaggtggatagtactccttgtacctcctgcaacccagaaccctggctgaccactttgaaggaggatgctccagcaggtcaatggccacaatccggggtctgatggccaagccagggagtacctcagagaagacctgcaggagttcctgggtggggaggtcctgctgtacaaactggatgacctcaccagggtgaatcctgtgacactagagacagtcctgaggtgcctgcaggcccggtacatggcagacacattctacaccaatgctggctgcaccctggtagccttgaaccccttcaagcctgttcctcagctctactcgcccgagctaatgagagagtaccatgctgcgcctcagccccagaaactgaagccccatgtgttcactgtgggtgaacagacctacaggaatgtcaagagcctgattgaaccagtcaaccagtctattgttgtcagtggagagagtggtgctggaaagacatggacgtctcgctgcctaatgaagttctatgctgtggtggccacctcacctgcatcttgggagagccacaagattgcagagaggatagaacagaggatcctgaactccaaccctgtcatggaagcttttgggaatgcgtgtacactgaggaataacaacagcagtcgctttgggaagttcatccagctccagctgaacagggctcagcaaatgactggagccgcagtccagacctacctcctagagaaaactcgagtggcctgccaggcttccagtgagaggaacttccacatcttctatcagatttgcaaaggagccagtgaggacgagaggctccagtggcaccttcctgagggagctgccttctcctggctgcccaacccagagaggagcttagaagaggattgttttgaggtgaccagagaggccatgctccatttgggcattgacacccctacccagaacaacatctttaaggtcctagctggactgctgcaccttggcaatatccagtttgctgcctccgaggatgaagcccagccctgccagccgatggatgatgccaagtactctgtcaggacggcagcctcgctgctggggctcccagaggacgtgctgctggagatggtgcagattagaaccatcagggcaggcagacagcagcaggtgttccggaagccctgcgcccgagccgagtgtgacacccgtagagactgcctggccaaactgatctatgcgcggttgtttgactggctggtatcagtgatcaacagcagcatctgtgcagacaccgactcgtggaccactttcataggcctgctggatgtgtatggatttgaatcatttcctgacaacagtctggaacagttgtgcatcaactacgccaatgagaagctgcagcagcattttgtggctcactacctaagggcccagcaggaggaatacgcagttgagggcctggagtggtcattcatcaactaccaggacaaccagccctgtttggatctcattgagggaagccccatcagcatctgctccctcataaatgaggaatgccgcctcaatcgacccagcagcgcagcccagctccagacacgcattgagactgccctggcaggcagcccctgcctgggccacaataagctcagccgggagcccagcttcattgtggtgcattatgcggggcctgtgcggtaccacacagcaggcctggtggagaagaacaaggaccctatcccacctgagctgaccaggctcctgcagcaatcccaggaccccctgctcatggggctgtttcctactaaccccaaagagaagacccaggaggaaccccctggccagagcagggcccctgtgttgaccgtggtgtccaagttcaaggcctcactggagcagcttctgcaggtcctacacagcaccacgccccactacattcgctgcatcaagcccaacagccagggccaggcgcagacctttctccaagaggaggtcctgagccagctggaggcctgtggcctcgtggagaccatccatatcagtgctgctggcttccccatccgggtctctcaccgaaactttgtagaacgatacaagttactaagaaggcttcatccttgcacatcctctggccccgacagcccatatcctgccaaagggctccctgcctctgtcttcagagaggcactgggcatctaaggtggtcagagccctcagaatggtgtccacacagcgaggaagccacgcttgaacctctcatccaggacattctccacactctgccggtcctaactcaggcagcagccataactggtgactcggctgaggccatgccagcccccatgcactgtggcaggaccaaggtgttcatgactgactctatgctggagcttctggaatgtgggcgtgcccgggtgctggagcagtgtgcccgctgcatccagggtggctggaggcgacaccggcaccgagagcaggagcggcagtggcgggccgtcatgctcatccaggcagccattcgttcctggttaactcggaaacacatccagaggctgcatgcagctgccacagtcatcaagcgtgcatggcagaagtggagaatcagaatggcctgccttgctgctaaagagctggatggtgtggaagaaaaacacttctctcaagctccctgttccctgagcacctcgccgctgcagaccaggctcctggaggcaataatccgcctctggcccctgggactggtcctggccaatacggctatgggtgtaggcagctttcagaggaaattagtggtctgggcttgcctccagctccccaggggcagccccagtagctacactgtccagacagcacaagaccaggctggtgtcacgtccatccgagcgctgcctcagggatcgataaagtttcactgcagaaagtctccactgcggtatgctgacatctgccctgaaccttcaccctacagcattacaggctttaatcagattctgctggaaagacacaggctgatccacgtgacctcttctgccttcactgggctggggtgatccttggtgcctttgtttccacaaggccttttcctgccccctgccttgccaaagacatttaatcagcacacagctgccagactattcccacagtgctccaaatgcacatgaacaacagtgacggctccagccttcgacccagagccccgtgcccagtgcgtcagtgggcctggggttccaggctacatcaagcactgatggtgtcagggctggtagttaccaaatcagggttaagaaacatcagggccacatttcactaccttcacagatcaaactcagcagcagtcatgactgtctgtcactacactggggatcccaattccacataagcacttttggaagaaaacagccaaagttggcctaaaattggcgctggaatttgggctgggaaaaatcttgtggttatttcctttaaaaaggaacaaaactttagtatttaattagttgatttatttaatgtaatttcaaacaattaaattatgaataatgcaatgtaaaaaaaaaaaaaaaaaaaaaaaa

SEQ ID NO: 354 - DNA, 2731 bp, Homo sapiens
gcgcttggcgggagatagaaaagtgcttcaacccgcgccggcggcgactgcagttcctgcgagcgaggagcgcgggacctgctgacacgctgacgccttcgagcgcggcccggggcccggagcggccggagcagcccgggtcctgaccccggcccggctcccgctccgggctctgccggcgggcgggcgagcgcggcgcggtccgggccggggggatgtctcggcggacgcgctgcgaggatctggatgagctgcactaccaggacacagattcagatgtgccggagcagagggatagcaagtgcaaggtcaaatggacccatgaggaggacgagcagctgagggccctggtgaggcagtttggacagcaggactggaagttcctggccagccacttccctaaccgcactgaccagcaatgccagtacaggtggctgagagttttgaatccagaccttgtcaaggggccatggaccaaagaggaagaccaaaaagtcatcgagctggttaagaagtatggcacaaagcagtggacactgattgccaagcacctgaagggccggctggggaagcagtgccgtgaacgctggcacaaccacctcaaccctgaggtgaagaagtcttgctggaccgaggaggaggaccgcatcatctgcgaggcccacaaggtgctgggcaaccgctgggccgagatcgccaagatgttgccagggaggacagacaatgctgtgaagaatcactggaactctaccatcaaaaggaaggtggacacaggaggcttcttgagcgagtccaaagactgcaagcccccagtgtacttgctgctggagctcgaggacaaggacggcctccagagtgcccagcccacggaaggccagggaagtcttctgaccaactggccctccgtccctcctaccataaaggaggaggaaaacagtgaggaggaacttgcagcagccaccacatcgaaggaacaggagcccatcggtacagatctggacgcagtgcgaacaccagagcccttggaggaattcccgaagcgtgaggaccaggaaggctccccaccagaaacgagcctgccttacaagtgggtggtggaggcagctaacctcctcatccccgctgtgggttctagcctctctgaagccctggacttgatcgagtcggaccctgatgcttggtgtgacctgagtaaatttgacctccctgaggaaccatctgcagaggacagtatcaacaacagcctagtgcagctgcaagcgtcacatcagcagcaagtcctgccaccccgccagccttccgccctggtgcccagtgtgaccgagtaccgcctggatggccacaccatctcagacctgagccggagcagccggggcgagctgatccccatctcccccagcactgaagtcgggggctctggcattggcacaccgccctctgtgctcaagcggcagaggaagaggcgtgtggctctgtcccctgtcactgagaatagcaccagtctgtccttcctggattcctgtaacagcctcacgcccaagagcacacctgttaagaccctgcccttctcgccctcccagtttctgaacttctggaacaaacaggacacattggagctggagagcccctcgctgacatccaccccagtgtgcagccagaaggtggtggtcaccacaccactgcaccgggacaagacacccctgcaccagaaacatgctgcgtttgtaaccccagatcagaagtactccatggacaacactccccacacgccaaccccgttcaagaacgccctggagaagtacggacccctgaagcccctgccacagaccccgcacctggaggaggacttgaaggaggtgctgcgttctgaggctggcatcgaactcatcatcgaggacgacatcaggcccgagaagcagaagaggaagcctgggctgcggcggagccccatcaagaaagtccggaagtctctggctcttgacattgtggatgaggatgtgaagctgatgatgtccacactgcccaagtctctatccttgccgacaactgccccttcaaactcttccagcctcaccctgtcaggtatcaaagaagacaacagcttgctcaaccagggcttcttgcaggccaagcccgagaaggcagcagtggcccagaagccccgaagccacttcacgacacctgcccctatgtccagtgcctggaagacggtggcctgcggggggaccagggaccagcttttcatgcaggagaaagcccggcagctcctgggccgcctgaagcccagccacacatctcggaccctcatcttgtcctgaggtgttgagggtgtcacgagcccattctcatgtttacaggggttgtgggggcagagggggtctgtgaatctgagagtcattcaggtgacctcctgcagggagccttctgccaccagcccctccccagactctcaggtggaggcaacagggccatgtgctgccctgttgccgagcccagctgtgggcggctcctggtgctaacaacaaagttccacttccaggtctgcctggttccctccccaaggccacagggagctccgtcagcttctcccaagcccacgtcaggcctggcctcatctcagaccctgcttaggatgggggatgtggccaggggtgctcctgtgctcaccctctcttggtgcatttttttggaagaataaaattgcctctctcttaaaaaaaaaaaaaaaaaa

SEQ ID NO: 355 - DNA, 4512 bp, Homo sapiens
gaaggagctgcggggcgcgggaggaggaagtagagcccgggaccgccaggccaccaccggccgcctcagccatggacgcgtccctggagaagatagcagaccccacgttagctgaaatgggaaaaaacttgaaggaggcagtgaagatgctggaggacagtcagagaagaacagaagaggaaaatggaaagaagctcatatccggagatattccaggcccactccagggcagtgggcaagatatggtgagcatcctccagttagttcagaatctcatgcatggagatgaagatgaggagccccagagccccagaatccaaaatattggagaacaaggtcatatggctttgttgggacatagtctgggagcttatatttcaactctggacaaagagaagctgagaaaacttacaactaggatactttcagataccaccttatggctatgcagaattttcagatatgaaaatgggtgtgcttatttccacgaagaggaaagagaaggacttgcaaagatatgtaggcttgccattcattctcgatatgaagacttcgtagtggatggcttcaatgtgttatataacaagaagcctgtcatatatcttagtgctgctgctagacctggcctgggccaatacctttgtaatcagctcggcttgcccttcccctgcttgtgccgtgtaccctgtaacactgtgtttggatcccagcatcagatggatgttgccttcctggagaaactgattaaagatgatatagagcgaggaagactgcccctgttgcttgtcgcaaatgcaggaacggcagcagtaggacacacagacaagattgggagattgaaagaactctgtgagcagtatggcatatggcttcatgtggagggtgtgaatctggcaacattggctctgggttatgtctcctcatcagtgctggctgcagccaaatgtgatagcatgacgatgactcctggcccgtggctgggtttgccagctgttcctgcggtgacactgtataaacacgatgaccctgccttgactttagttgctggtcttacatcaaataagcccacagacaaactccgtgccctgcctctgtggttatctttacaatacttgggacttgatgggtttgtggagaggatcaagcatgcctgtcaactgagtcaacggttgcaggaaagtttgaaggaagtgaattacatcaaaatcttggtggaagatgagctcagctccccagtggtggtgttcagatttttccaggaattaccaggctcagatccggtgtttaaagccgtcccagtgcccaacatgacaccttcaggagtcggccgggagaggcactcgtgtgacgcgctgaatcgctggctgggagaacagctgaagcagctggtgcctgcaagcggcctcacagtcatggatctggaagctgagggcacgtgtttgcggttcagccctttgatgaccgcagcagttttaggaactcggggagaggatgtggatcagctcgtagcctgcatagaaagcaaactgccagtgctgtgctgtacgctccagttgcgtgaagagttcaagcaggaagtggaagcaacagcaggtctcctatatgttgatgaccctaactggtctggaataggggttgtcaggtatgaacatgctaatgatgataagagcagtttgaaatcagatcccgaaggggaaaacatccatgctggactcctgaagaagttaaatgaactggaatctgacctaacctttaaaataggccctgagtataagagcatgaagagctgcctttatgtcggcatggcgagcgacaacgtcgatgctgctgagctcgtggagaccattgcggccacagcccgggagatagaggagaactcgaggcttctggaaaacatgacagaagtggttcggaaaggcattcaggaagctcaagtggagctgcagaaggcaagtgaagaacggcttctggaagagggggtgttgcggcagatccctgtagtgggctccgtgctgaattggttttctccggtccaggctttacagaagggaagaacttttaacttgacagcaggctctctggagtccacagaacccatatatgtctacaaagcacaaggtgcaggagtcacgctgcctccaacgccctcgggcagtcgcaccaagcagaggcttccaggccagaagccttttaaaaggtccctgcgaggttcagatgctttgagtgagaccagctcagtcagtcacattgaagacttagaaaaggtggagcgcctatccagtgggccggagcagatcaccctcgaggccagcagcactgagggacacccaggggctcccagccctcagcacaccgaccagaccgaggccttccagaaaggggtcccacacccagaagatgaccactcacaggtagaaggaccggagagcttaagatgagactcattgtgtggtttgagactgtactgagtattgtttcagggaagatgaagttctattggaaatgtgaactgtgccacatactaatataaattactgttgtttgtgcttcactgggattttggcacaaatatgtgcctgaaaggtaggctttctaggaggggagtcagcttgtctaacttcatgtacatgtagaaccacatgtttgctgtcctactacgacttttccctaagttaccataaacacattttattcacaaaaaacacttcgaatttcaagtgtctaccagtagcacccttgctctttctaaacataagcctaagtatatgaggttgcccgtggcaactttttggtaaaacagcttttcattagcactctccaggttctctgcaacacttcacagaggcgagactggctgtatcctttgctgtcggtctttagtacgatcaagttgcaatatacagtgggactgctagacttgaaggagagcagtgattgtgggattgtaaataagagcatcagaagccctccccagctactgctcttcgtggagacttagtaaggactgtgtctacttgagctgtggcaaggctgctgcctgggactgtcctctgccacaaggccatttctcccattatataccgtttgtaaagagaaactgtaaagtctcctcctgaccatatatttttaaatactggcaaagcttttaaaattggcacacaagtacagactgtgctcatttctgtttagtatctgaaaacctgatagatgctacccttaagagcttgctcttccgtgtgctacgtagcacccacctggttaaaatctgaaaacaagtacccctttgacctgtctcccactgaagcttctactgccctggcagctcgcctgggcccaactcagaaacaggagccagcagagcactctctcacgctgatccagccgggcaccctgcttaagtcagtagaagctcgctggcactgcccgttcctacttttccgaagtactgcgtcactttgtcgtaagtaatggcccctgtgccttcttaatccagcagtcaagcttttgggagacctgaaaatgggaaaattcacactgggtttctggactgtagtattggaagccttagttatagtatattaagcctataattatactctgatttgatgggatttttgacatttacacttgtcaaaatgcagggggttttttttggtgcagatgattaaacagtcttccctatttggtgcaatgaagtatagcagataaaatgggggaggggtaaattatcaccttcaagaaaattacatgtttttatatatatttggaattgttaaattggttttgctgaaacatttcacccttgagatattatttgaatgttggtttcaataaaggttcttgaaattgttaccagtgaattcagtttataaatcttattacaaaagacttacccacgtacctgaaatagctgccgatagaccagtgagaggtaggttctcctctgcccgttattaccgaccaaaaaaaaaactggacatcaattttttagtaaaccaaaaaataagtctcaacaaatgcctttgccaaaataaggttttattttgaaagtcatttgatgaaagtcatttgaaagacactgaggagggaaggaggcctaagacccaacagatgtaggatccagatctggattcgtgccagccccaccaatggtctgtcaggccaagaaggtgctttctttggtaattcatgttttttaacttcctggagaagagatcttttcccacaagccatcttcattttttttgtagagtagggctttatttccagaaaacagtgtgtgagctggagatgggtgtttttttaaaaacatcaaggtagatctaatatgttcaacaaagtggggtggctcagccagaggcgaagtggaaagattctgaaaacacaagatggtgggcattagagaagccaaccttactgtcccctgctgtgataaagatgtcaaagtatctttgttcttggacacaaatatatataataaaatacgttaagaaacgaaaaaaaaaaaaaaaa

SEQ ID NO: 356 - DNA, 1227 bp, Homo sapiens
atggagcccttgggactggtcgtgcatgggaaagctgaacctttttccgcagcactccgaagccttgtcaacaacccgcgatacagtgatgtttgcttcgtggttggtcaagaacggcaggaggtatttgcccatcggtgcttgttggcctgtagatgcaacttcttccagcgacttctgggcacagagccaggccccggggtgcccagtcctgtggtgctaagcactgtgccaactgaggccttcctggcagtgctggagttcctatataccaacagtgtcaagctgtaccgccactctgtgctggaagtgctgacagcggctgtggagtatgggctggaggaactgagagagctgtgcctgcagtttgtggtgaaggtgctggatgtggacttggtttgtgaggccctgcaggtggccgtaacctttggcctggggcagctgcaggagcgctgcgtggctttcatagaggcccacagccaggaggccctccggacccgaggcttcctggagctgtcggcggccgcgctgctgcccctgctccgcagcgacaagctctgcgtggacgaggctgaactggtccgcgcggcccgaagctgggcgcgcgtgggcgcggcggtgctggagcggccggtggctgaggtggcggccccggtggtgaaagagctgagactagccttgctggccccggcggagctgagcgccctggaagagcagaaccggcaggaaccactcatcccggtggagcagattgtggaggcgtggaaatgccatgccctgcggagaggggatgaggcccggggcgccccgtgtcgccgccggagaggcaccctgccccgggagcatcaccgctttctggacctgtccttcaaatgatccaacgccgggactcgcagggagccctcgacccgcccagctgagcctgccccaaactacagctcccgaagtgctcggcgttcggagcgggcttccgttcccagcgtgcccagtgagccgggcgccggaagaaccgttgtctgccacgcgcagccccttgtgcgggatcaagcccgtgtgggcgaggtggggtcgggccgggcagggcttgggctgggcctccctgagggggtgaaactcgaaaacgaggatttccttcgttccacaccctgactctacgccctgcccctgggcattgtcgtctactagtctattctgatgactcccacatatctatctgttcagctcagc

SEQ ID NO: 357 - DNA, 2269 bp, Homo sapiens
ccacccccggccccgaagctccgccacccgccgccatgagtagctttggagctggcaaaaccaaagaagttatcttcagtgtggaggatggctccgtgaaaatgttcctgaggggccgccctgtgcccatgatgatcccagacgagctggcacccacctacagcctggacacacgctcggagctgccttcttgccggctcaagctggagtgggtctatggctaccgtggccgagactgccgggccaacctttatttgctgcccaccggggagatagtgtactttgtggcctccgtagccgtgctatacagcgtggaggagcagaggcagcgacactacctgggacacaacgatgacatcaaatgcttggccatccacccagatatggtcaccatcgccacgggacaggtggcgggaaccactaaggaagggaagccgctgccgccccacgtgcgcatctgggactcagtttccctctccaccttacacgtgctgggcttgggggtgtttgacagagccgtgtgctgtgtgggcttctccaaatctaatggaggcaacctgctgtgtgcagtggatgaatccaatgatcacatgctctcggtgtgggactgggccaaggagaccaaggtggtggatgtcaagtgctccaatgaggctgtattggtggccaccttccaccccacggaccccactgtgcttatcacctgcgggaaatctcacatctacttctggaccttggaggggggcagcttgagcaagcggcaaggcctctttgagaaacatgagaaaccgaagtatgtgctgtgtgtgacctttttggaaggtggcgacgtggtcacgggggactctggggggaacctctatgtttggggcaaaggtgggaaccgtatcacacaggcggtgctgggcgcccacgacggcggcgtgtttgggctctgcgccctgcgggacgggacgctggtgtctggagggggccgtgatcggcgggtggtcctctggggttctgactacagcaagctgcaggaagtggaggtccctgaggactttggccctgtgcgcaccgtggcagagggccacggagacacactgtacgtggggaccacccgcaattccatcctgcagggctccgtgcacacaggcttctcactgctggtccagggccatgtggaagagctgtggggcctggccacacaccccagtcgggcccagtttgtgacctgcgggcaggataagctggtgcatctatggagctcagattcccaccagcccctgtggagcaggatcatcgaggaccctgcccgctcagccggcttccaccccagtggctctgtcctggctgtgggtacagtgactggcagatggctgctgctggacacggagacccatgacctggtggctatccacacagacggcaatgaacagatctcagtggtcagcttctccccagacggggcgtacctggccgtgggctcccacgacaacttggtgtacgtgtacacggtggaccagggcggccgcaaggtcagccgcctgggcaagtgctcgggccattccagttttatcacccacctggattgggcccaggacagcagctgctttgtcaccaactccggggactatgagattctgtactgggacccggctacctgtaagcagatcaccagtgcggatgctgtgaggaacatggaatgggccacagctacttgtgtcctagggtttggggtgtttgggatctggtctgagggggcggacggcactgatatcaacgctgtggcccgctctcatgatgggaagttgctggcttcagctgatgactttggcaaagttcacctgtttagctacccctgctgtcagcctcgagccctcagccacaagtacggtggacacagcagccatgtgacaaatgtggccttcttgtgggatgacagcatggccctgaccacagggggcaaggacaccagtgtgctacagtggcgggtggtctgatgcggccagggaagagtcaggtgtcagggcaggaattctattttcgggagatgtctattgccgagtagagtaatatatacccagagtatgtctatagcagagggggttatgggggcgggagggtagactgacatacagaagtctctatttatccgggtgggaagagggagtcacatcgctttggggatccattggtgtttggtttggggtgttttttaagttttttcttttatatcatccagaaataaagacacgtacactaaaaaaaaaaaaaaaaaaaaaaa

SEQ ID NO: 358 - DNA, 3149 bp, Homo sapiens
attctttggaatactactgctagaagtctgacttaagacccagcttatgggccacatggcacccagctgcttctgcagagaaggcaggccactgatgggtacagcaaagtgtggtgctgctggccaagccaaagacccgtgtaggatgactgggcctctgccccttgtgggtgttgccactgtgcttgagtgcctggtgaagaatgtgatgggatcactagcatgtctgcggagagcggccctgggacgagattgagaaatctgccagtaatgggggatggactagaaacttcccaaatgtctacaacacaggcccaggcccaaccccagccagccaacgcagccagcaccaaccccccgcccccagagacctccaaccctaacaagcccaagaggcagaccaaccaactgcaatacctgctcagagtggtgctcaagacactatggaaacaccagtttgcatggcctttccagcagcctgtggatgccgtcaagctgaacctccctgattactataagatcattaaaacgcctatggatatgggaacaataaagaagcgcttggaaaacaactattactggaatgctcaggaatgtatccaggacttcaacactatgtttacaaattgttacatctacaacaagcctggagatgacatagtcttaatggcagaagctctggaaaagctcttcttgcaaaaaataaatgagctacccacagaagaaaccgagatcatgatagtccaggcaaaaggaagaggacgtgggaggaaagaaacagggacagcaaaacctggcgtttccacggtaccaaacacaactcaagcatcgactcctccgcagacccagacccctcagccgaatcctcctcctgtgcaggccacgcctcaccccttccctgccgtcaccccggacctcatcgtccagacccctgtcatgacagtggtgcctccccagccactgcagacgcccccgccagtgcccccccagccacaacccccacccgctccagctccccagcccgtacagagccacccacccatcatcgcggccaccccacagcctgtgaagacaaagaagggagtgaagaggaaagcagacaccaccacccccaccaccattgaccccattcacgagccaccctcgctgcccccggagcccaagaccaccaagctgggccagcggcgggagagcagccggcctgtgaaacctccaaagaaggacgtgcccgactctcagcagcacccagcaccagagaagagcagcaaggtctcggagcagctcaagtgctgcagcggcatcctcaaggagatgtttgccaagaagcacgccgcctacgcctggcccttctacaagcctgtggacgtggaggcactgggcctacacgactactgtgacatcatcaagcaccccatggacatgagcacaatcaagtctaaactggaggcccgtgagtaccgtgatgctcaggagtttggtgctgacgtccgattgatgttctccaactgctataagtacaaccctcctgaccatgaggtggtggccatggcccgcaagctccaggatgtgttcgaaatgcgctttgccaagatgccggacgagcctgaggagccagtggtggccgtgtcctccccggcagtgccccctcccaccaaggttgtggccccgccctcatccagcgacagcagcagcgatagctcctcggacagtgacagttcgactgatgactctgaggaggagcgagcccagcggctggctgagctccaggagcagctcaaagccgtgcacgagcagcttgcagccctctctcagccccagcagaacaaaccaaagaaaaaggagaaagacaagaaggaaaagaaaaaagaaaagcacaaaagaaaagaggaagtggaagagaataaaaaaagcaaagccaaggaacctcctcctaaaaagacgaagaaaaataatagcagcaacagcaatgtgagcaagaaggagccagcgcccatgaagagcaagccccctcccacgtatgagtcggaggaagaggacaagtgcaagcctatgtcctatgaggagaagcggcagctcagcttggacatcaacaagctccccggcgagaagctgggccgcgtggtgcacatcatccagtcacgggagccctccctgaagaattccaaccccgacgagattgaaatcgactttgagaccctgaagccgtccacactgcgtgagctggagcgctatgtcacctcctgtttgcggaagaaaaggaaacctcaagctgagaaagttgatgtgattgccggctcctccaagatgaagggcttctcgtcctcagagtcggagagctccagtgagtccagctcctctgacagcgaagactccgaaacaggtcctgcctaatcattggacacggactcttaataaaacggtcttcagttccagattccttcccagcaagctatagcttaagtccattttcttccgtgaaagggacaggactccatcaagttatggaattcctcagagccctgggcctgtcccccggggtggattagtcatgtccagcagcacacgcctagtcccgccttcgggaaggctgcctgcctggccagccgcccaggcctctctgtgtaaagactgcctggctgtcctgcccagccttcctggttctctggggtcctctgggtgggtggcatctcctggagggtgatgacaatccccaacacatgcattcatgtggtgctactctgtgtgcaaagccagaccccaagtatgttttctctctttgtcccatccctctttttctgggactttggaccctaactacttccctcctgaaccttgcagtgacatcagtccaggagagctctcgttcagtgtgcggaagaacactctgacctctagagctgtcctagataaggagtgggagctttagaggcaaggcctctagaccctggaaggctcagtgaggctcttcccacagcatgcttctcactggtgccctgtaagctcgagccaccgctgactctgagcctttttggagtctttcctccttcgtctccattgttccgtgcatttccaaagcttaagttgctggtgggcatttccccagtttctatgggctccgtcttctcaagtcacatagggaaagtaccttc

SEQ ID NO: 359 - DNA, 2903 bp, Homo sapiens
gcgcgctccttttgcaggctcgtggcggtcggtcagcggggcgttctcccacctgtagcgactcaggttactgaaaaggcgggaaaacgctgcgatggcggcagctgggggaggaggaagataagcgcgtgaggctggggtcctggcgcgtggttggcagaggcagagacataagacgtgcacgactcgccccacagggccctcagaccccttccttccaaaggagcctccaagctcatggcctccttaggagcgaacccaaggaggacaccgcagggaccgagacctggggcggcctcctccggcttccccagcccggccccagtgccgggccccagggaggccgaggaggaggaagtcgaggaggaggaggagctggccgagatccatctgtgtgtgctgtggaattcaggatacttgggcattgcctactatgatactagtgactccactatccacttcatgccagatgccccagaccacgagagcctcaagcttctccagagagttctggatgagatcaatccccagtctgttgttacgagtgccaaacaggatgagaatatgactcgatttctgggaaagcttgcctcccaggagcacagagagcctaaaagacctgaaatcatatttttgccaagtgtggattttggtctggagataagcaaacaacgcctcctttctggaaactactccttcatcccagacgccatgactgccactgagaaaatcctcttcctctcttccattattccctttgactgcctcctcacagttcgagcacttggagggctgctgaagttcctgggtcgaagaagaatcggggttgaactggaagactataatgtcagcgtccccatcctgggctttaagaaatttatgttgactcatctggtgaacatagatcaagacacttacagtgttctacagatttttaagagtgagtctcacccctcagtgtacaaagtggccagtggactgaaggaggggctcagcctctttggaatcctcaacagatgccactgtaagtggggagagaagctgctcaggctatggttcacacgtccgactcatgacctgggggagctcagttctcgtctggacgtcattcagttttttctgctgccccagaatctggacatggctcagatgctgcatcggctcctgggtcacatcaagaacgtgcctctgattctgaaacgcatgaagttgtcccacaccaaggtcagcgactggcaggttctctacaagactgtgtacagtgccctgggcctgagggatgcctgccgctccctgccgcagtccatccagctctttcgggacattgcccaagagttctctgatgacctgcaccatatcgccagcctcattgggaaagtagtggactttgagggcagccttgctgaaaatcgcttcacagtcctccccaacatagatcctgaaattgatgagaaaaagcgaagactgatgggacttcccagtttccttactgaggttgcccgcaaggagctggagaatctggactcccgtattccttcatgcagtgtcatctacatccctctgattggcttccttctttctattccccgcctgccttccatggtagaggccagtgactttgagattaatggactggacttcatgtttctctcagaggagaagctgcactatcgtagtgcccgaaccaaggagctggatgcattgctgggggacctgcactgcgagatccgggaccaggagacgctgctgatgtaccagctacagtgccaggtgctggcacgagcagctgtcttaacccgagtattggaccttgcctcccgcctggacgtcctgctggctcttgccagtgctgcccgggactatggctactcaaggccgcgttactccccacaagtccttggggtacgaatccagaatggcagacatcctctgatggaactctgtgcccgaacctttgtgcccaactccacagaatgtggtggggacaaagggagggtcaaagtcatcactggacccaactcatcagggaagagcatatacctcaaacaggtaggcttgatcacattcatggccctggtaggcagctttgtgccagcagaggaggccgaaattggggcagtagacgccatcttcacacgaattcatagctgcgaatccatctcccttggcctctccaccttcatgatcgacctcaaccaggtggcgaaagcagtgaacaatgccactgcacagtcgctggtccttattgatgaatttggaaagggaaccaacacggtggatgggctcgcgcttctggccgctgtgctccgacactggctggcacgtggacccacatgcccccacatctttgtggccaccaactttctgagccttgttcagctacaactgctgccacaagggcccctggtgcagtatttgaccatggagacctgtgaggatggcaacgatcttgtcttcttctatcaggtttgcgaaggtgttgcgaaggccagccatgcctcccacacagctgcccaggctgggcttcctgacaagcttgtggctcgtggcaaggaggtctcagacttgatccgcagtggaaaacccatcaagcctgtcaaggatttgctaaagaagaaccaaatggaaaattgccagacattagtggataagtttatgaaactggatttggaagatcctaacctggacttgaacgttttcatgagccaggaagtgctgcctgctgccaccagcatcctctgagagtccttccagtgtcctccccagcctcctgagactccggtgggctgccatgccctctttgtttccttatctccctcagacgcagagtttttagtttctctagaaattttgtttcatattaggaataaagtttattttgaagaaaaaaaaaaaaaaaaaaa

SEQ ID NO: 360 - DNA, 2884 bp, Homo sapiens
aaaagtggaaaactatcggcggtggcccaggctcggtggctcactcctggaatcccagcactttgggaggccaaggtggggggatcacgaggtcaggggatcgagaccatcctggctaacaggtgaaaccctgtctctactaaaaatacaaaaaaattagccaggcgtggtggaggcgcctgtagtcgcagctactcgggaggctgaggcaggagaatggcgtgaacccaggaggcggagcctgcagtgagccgagattgctgcactgcactccagcctgggcgacagaggaagactccgtctcaaaaaaaaaaaaaaaaaaaagaaagaaaactacaggcggggacggcttctcgtaacagagtatgcaagaggaggagacctgcacaactggatacacccagaaatgtccctggctcaacaagccttccagcatgaccctgtgtcttccccctccacgcagagcaccagcaacagtagtgcagacccagaaacctccctggctcaacaaggcccccagcatgaccccatggccttcccctccacccagagcacctgtagcagtggtggagtcccagaaatgtccctggctcaacaagccttccagtatcagcctgtggccttcttctccacccagagcaccagcagcagtggtggagacccagaaacatcccaggctcaacaagccgcccagcatgaccctgtggcctacccctatacccagagcaacagcagcagtggtgcagacccagaaacctctggctcaccacctccccagcaacaccctgtggccttctccaccaagagcaccagtagcagtggcagagacccagaaatgtccctgacacagcaacaaccatcccaggaagccagtgtcattcaggctgggcagcccaaggctttgacttcagccttgccaataaggaggctgtgactgccgcagggctgccaggggatgcacttccattgtattaaaatgtttttgcctgtgtccaccgccgaaaaggaggaataagatgaccccaacatagttgcacggctgaagacaaaaatcaagttggtggggtcaatattgttaccatagtcactacacttagagtagttttatagtcagtgtagacaggtggcaccatgcagcagggatcagcctccaccacacctgaccaggagctccagaactgtaaaatcctggacaccattggccgtggcacgttcagtgaggtccaggatcacatgctgattgggacccaaatggccatcaaaatcatccccaaggctggctcccttggcatcactctccagagagtgataagtattttaaagttactctgtcacttcaatattgtacggttgtatcaagtgattgacacccccaacaccagttatttatttagtaacggagtatgcaagaggaggacacccacgcaaccaatacaccaccatggcctcatgagggaggagaaggcctagaccatgttcaggcagattctgtcggccatgcagtagtgccatagcaaattgcgcagagacctgaacccagaaaacatcatccttgatgaggacggtaacgttaagatcgcagacttcggctttggtaccacattccatgatgggcagaagctgacagccctttgtagcacttaacccctacatggccctggaacgtttcctaggccagggctaccaatgtgccaccatggatattcagagcctcagagtaattttataccacatggtggctggggttctgcccttctgctcatgcagcattagggtcctctcagcaaaaatttaaagtggaagctatttttccccagtctacttttcctgaggtcttaaaagcctcattaaaaaactatcaacagtagaccccagggagcagaccacactagaagaagttatgagggacccgtgggtgaacagtggtcaggagttgcctctgacaacatgaagaacaaatcctggaccacctgaatcccaaaacaacccagcttttggtggccatgggattccaggctgagaacctatctgtggcaatcaaagaaaaattattcagttatcccatggccacctaccttgttttggaacaaacaaaacagaagaagcggtccactatcagaccacagacccttcctcctggggatcccacttgtcctctctacattgaagtttccaccttccctctttcactgaagcgggctcatagcattcagcagaagactgtgggtgccaagtctgggcagggcctttgcccttgggagtcctgttttagacccagctccaccacgtggccctggcctcttctctgccctgtctgtgcttgcagccatggtgcccagtctggccccaccaggagacaccagaacgactgtccatgtgtctactccttggcaccttccccgcatggtgggtagatgggcagggaggggtgggaatctgtgtaaccgtggaagggaacggccctcagacccagagggtttggagcctggggtattgtcaccgacagtggccttagcctagctagcacagttagtgctgtgcatcacagcatagcttttagaggcaggatttgtagtcagtatagttgggaggcaccatggagcagggatcaccctccacctcacttgacaaggagatacaaaactatcagttcatagacaccatctgatagggaactggctcagcataggccaactgggacccaggttgccatcttgaagactttccatcacccaaatatcattcagctcttccaggtggtgagggagtaaaccagaggaggagagttgcaccaccagatataccactatggccacatcgaggaggaagaggaggcccggaccatgttcaggcagattctgtcagccctgcagtactgccactt

SEQ ID NO: 361 - DNA, 2980 bp, Homo sapiens
gcggggcctctaccggcccgatggagcgcgcgggcgctactagccgcgggggccaagcccctggcttcttactgcggcttcatactgagggccgagccgaggcggcgcgggtgcaggagcaggacttacggcagtgggggctgacagggattcacctacgctcttaccagctggagggagtaaactggctcgcccagcgcttccattgtcagaatggctgtatcctgggagatgagatgggcctggggaagacctgccagactattgctctcttcatttatttggcaggaagattaaatgatgaagggccatttctgattctttgtcccttgtctgttttgagcaactggaaagaagaaatgcagagatttgctccaggtctttcctgtgtaacatatgcaggcgacaaggaggaaagagcctgccttcagcaagacctgaaacaggagtcacgttttcatgtgctactgactacctatgagatttgcttgaaagatgcatcatttctaaaatcattcccttggagtgttcttgttgtggatgaagctcacaggttgaaaaaccaaagctccctgctgcataagaccttgtcagagttctcagtagtcttcagtctcctgttgaccggaactcccatccagaacagcctccaagagctctactccctcctcagttttgtggagcctgatctcttttccaaggaagaggtgggagattttattcaacgctaccaggatattgagaaagaatctgagtcagcaagtgaactgcacaaactcttgcagccatttctgctgaggcgagtgaaagctgaggtagctacagagcttcccaagaagacagaagtagtgatataccatggcatgtcagcattgcagaagaaatactacaaggccattttgatgaaagacctagatgcatttgaaaatgagacggcaaagaaggttaaactacagaacattttgtcccagcttcgaaagtgtgtggatcacccatatttgtttgatggtgtggagccggagccttttgaagttggagaccacctgactgaggctagtgggaagcttcacctgctggataagctactagcattcctgtattctgggggccatcgggttttacttttctcccaaatgacccagatgttggatattctccaagactatatggattacagaggctacagctatgagcgtgtggatggttctgtgagaggagaagagagacacttggccattaagaactttggacagcagcccattttcgtttttctcctgagtactagggcaggtggagttggcatgaacttaacagcagcagatactgtgatttttgttgacagtgactttaatcctcagaatgacttgcaagcagctgccagggctcatcgcattggccaaaacaagtctgttaaagttattcggctgattggtcgagacactgtggaagaaatagtctataggaaagcagcctccaaactgcagctcaccaacatgatcatagaaggaggccattttactctgggagcccagaaacccgctgccgatgctgacctccagttgagtgagatactcaaatttggtttggataaactgctggcctctgaggggagcaccatggatgaaatagacctggagtccatcctgggagaaacaaaagatggccagtgggtctctgatgccttgcctgcagcagaaggagggagcagagatcaagaggaaggaaaaaatcatatgtacttatttgaaggtaaagattattctaaagagcccagtaaggaagacagaaaatcatttgaacaactggtaaaccttcagaaaacccttttggagaaagctagtcaagagggccgatcactccgaaataaaggcagtgttctcatcccaggccttgtggagggatctaccaaaaggaagcgggttctgagtccagaagagctggaggacagacagaagaaaagacaagaagcagctgccaagagaaggagactcatagaggagaagaagaggcaaaaggaagaggctgaacataagaaaaagatggcctggtgggaatccaacaattaccagtccttctgcctgccctctgaggagagcgagccagaggaccttgagaatggggaagagagctctgctgagctggattaccaagacccagatgctacttccctcaagtacgttagtggtgatgtcacccaccctcaggctggggccgaggatgctctcattgtgcactgcgtagatgactctggccactggggcagaggtggtttatttacagctctggaaaagcgatccgctgagccaagaaaaatatatgagctggctgggaaaatgaaagacctgagtttgggaggtgtccttttatttcctgttgatgataaagaatcaagaaacaaagggcaagatttgttggccttgattgtggctcagcatcgtgatcgttccaatgtcctgtctggcattaagatggcagccctagaagagggcctgaagaagatatttttagcagcaaaaaagaagaaagcaagtgttcatcttccacgtattggacatgccacgaaaggttttaactggtatggtactgagcgacttattcggaaacatctggctgcaagaggcatcccaacttacatatattattttcctagaagcaagtctgctgtccttcattcacagtcttcatcttcctcctcaagacagctggtgccttaagaattggcccagcctcagatcctgtctttagcaaccagctaatatttacccagaggtactgcaatagagtatttcaaaatggaatcaggatctggtgggcctcagaaattgtctcttttctgagtttcagtttggttctcctggatgttttgctctgttttgatacctgtaatatagggaaacacaactttttttgggaaagccctttgaccccagcttgctagttgcataataataaattttctgttcctaaaaaaaaaaaaaaa

SEQ ID NO: 362 - DNA, 3320 bp, Homo sapiens
gcgccccagaggctcaagaaaacccgcgggagcctcgcccggacccaggaactcgtgctcggggccaaccggctgggccgcgatcgcgtttcgtccggggccgcggcggccgtggggaatcggctgcagcgaatcggtggcgcgcggcgcctgagcgcgctgcagtcacccgggagccgggtccaggtcgtcttcccgtgacgcccagatctgtcctgcaggatggagccagcaccctcagaggttcgactcgccgtccgggaagccattcatgccctctcgtcttcggaggatggcggccacatcttctgcaccctggagtccctgaagcggtatctcggtgagatggagcctccagcgctcccgagggagaaggaggagtttgcctcggcccacttctcgcctgtcctcagatgtcttgccagcaggctgagcccagcctggctggagctgctgccccatggccgcctggaggagctgtgggccagcttcttcctggagggcccggcggaccaagccttcctggtgttgatggagaccatcgagggtgctgcgggccccagcttccggctgatgaagatggcgcggctgctggccagattcctgcgcgagggccggctggcagtgctgatggaggcgcagtgtcggcagcagacgcggcccggcttcatcctgctccgggagacgctgctgggcaaggtggtggccctgcccgatcacctgggcaaccgcctgcagcaggagaacttggccgagttcttcccccagaactacttccgcctgctcggcgaggaggtcgtccgggtgctgcaggcggttgtggactctctccaaggtggcctggattcctccgtgtccttcgtgtctcaggtccttgggaaagcctgtgtccacgggaggcagcaggagatcctgggcgtgctggtaccccggctggcagcgctcacccagggcagctacctgcaccagcgcgtctgctggcgcctggtggagcaagtgccggaccgggccatggaggctgtgctgaccgggctggtggaggccgcactggggcctgaggtcctttcgagactgctggggaacctggtggtgaagaacaagaaggcccagtttgtgatgacccagaagcttctgttcttacagtcccggctcacgacgcccatgctgcagagcctgctgggccatctggccatggacagccagcggcgcccgctcctgctgcaggtgctgaaggagctgttggagacgtggggcagcagcagtgccatccgccacactcccctgccgcagcagcgccacgtcagcaaggctgtcctcatctgcctggcgcaactcggggagccggaactgcgggacagccgggatgaactgctggccagcatgatggcgggcgtgaagtgccgcctggacagtagcctgccccccgtgcgacgcctgggcatgatcgtggcagaggtcgttagtgcccggatccaccccgaggggcctcccctgaaattccagtacgaagaggatgaactgagcctcgagctgctggccttggcctccccccagcctgcgggtgacggcgcctcggaggcgggcacgtccctcgttccagccacggcagagccccctgcagagacccccgcagagatcgtggatggcggcgtcccccaagcacagctggcgggctctgactcggacctggacagcgatgatgagtttgtcccctacgacatgtcgggggacagagagctgaagagcagcaaggctcctgcctacgtccgggactgcgtggaagccctgaccacgtctgaggacatagagcgctgggaggcagccctgcgggcccttgagggcctggtctacaggagccccacagccactcgggaggtgagcgtggagctggccaaggtgcttctgcatctggaggagaagacctgtgtggtgggatttgcagggctgcgccagagagccctggtggccgtcacggtcacagacccggccccggtggccgactatctgacctcacagttctatgccctcaactacagcctccggcagcgcatggacatcctggatgtgctgactctggctgcccaggagctgtctaggcctgggtgcctcgggaggactccccaacctggctccccaagtcccaacaccccgtgcctgccagaggcagccgtctctcagcctggcagtgccgtggcgtctgactggcgggtggtggtggaggagcggatcagaagcaagacccagcggctctccaagggtggcccgaggcagggcccggcaggcagccccagcagattcaactccgtggccggccacttcttcttccccctccttcagcgctttgacaggcctctggtgaccttcgacctcttgggagaagaccagctggttctcggaaggctggcgcacaccttaggggccctgatgtgcctggctgttaacaccacggtggctgtggccatgggcaaggccctgctggaattcgtgtgggcccttcgcttccacatcgatgcctacgtgcgccaggggctgttgtcggccgtctcctccgtcctgctcagcctgcctgctgcgcgcctgctggaggacctgatggacgagctgctggaagcccggtcctggctggcggacgtggctgagaaagacccggacgaggactgcaggacgctggcactgagggccctgctgcttctgcagagactcaagaacaggctcctcccacccgcgtctccctagtccctggaggcctccccaggaccaccctcgccgacagcaaggcaggcggctgagcagcggcctggagcagcagagccaggctttgtagcgaggccaggtcttcggccgcatccggtacggagagtgcagatgcaggaaggcccggcctgccgctatttatagtgcagccagtccgctaaaaatacactgggcctgggcactgcccgccgggacatggcagcctggacgtggggctggggctgtgggcgctgctggcggggttgactcttccagtgagggcagaaccaggctggcaggaggggaggacggtgtacctgctgctcagagcccccaaggctctcctctgagagccaccaagcaggacagagcagctcttgtcccaggtccctcgggctgagcgccgtgtcaccaggagaatagtgctcacagcccaggcagggtgtgtggctcctggatgggctcgtggggcgggatgggacagggcacgggctctcagaaaataaactgctttattggaaaaaaaaaaaaaaaaaaaaaaaaaaaaaaaaaaaaaaaaaaaaaaaaaaaaaaaaaaaaaaaaaaaa

SEQ ID NO: 363 - DNA, 9166 bp, Homo sapiens
atggctttggtcacggtccagcggtcacctacccccagcaccacctccagcccctgcgcctcggaggcagacagtggggaggaagaatgccggtcacagcccaggagcatcagcgagagctttctaactgtcaaaggtgctgccctttttctaccacggggaaatggctcatccacaccaagaatcagccacagacggaacaagcatgcaggcgatctccaacagcatctccaagcaatgttcattttactccgcccagaagacaacatcagactggctgtaagactggaaagtacttaccagaatcgaacacgctatatggtagtggtttcaactaatggtagacaagacactgaagaaagcatcgtcctaggaatggatttctcctctaatgacagtagcacttgtaccatgggcttagttttgcctctctggagcgacacgctaattcatttggatggtgatggtgggttcagtgtatcgacggataacagagttcacatattcaaacctgtatctgtgcaggcaatgtggtctgcactacagagcttacacaaggcttgtgaagtcgccagagcgcataactactacccaggcagcctatttctcacttgggtgagttattatgagagccatatcaactcagatcaatcctcagtcaatgaatggaatgcaatgcaagatgtacagtcccaccggcccgactctccagctctcttcaccgacatacctactgaacgtgaacgaacagaaaggctaattaaaaccaaattaagggagatcatgatgcagaaggatttggagaatattacatccaaagagataagaacagagttggaaatgcaaatggtgtgcaacttgcgggaattcaaggaatttatagacaatgaaatgatagtgatccttggtcaaatggatagccctacacagatatttgagcatgtgttcctgggctcagaatggaatgcctccaacttagaggacttacagaaccgaggggtacggtatatcttgaatgtcactcgagagatagataacttcttcccaggagtctttgagtatcataacattcgggtatatgatgaagaggcaacggatctcctggcgtactggaatgacacttacaaattcatctctaaagcaaagaaacatggatctaaatgccttgtgcactgcaaaatgggggtgagtcgctcagcctccaccgtgattgcctatgcaatgaaggaatatggctggaatctggaccgagcctatgactatgtgaaagaaagacgaacggtaaccaagcccaacccaagcttcatgagacaactggaagagtatcaggggatcttgctggcaagcaaacagcggcataacaaactatggagatctcattcagatagtgacctctcagaccaccacgaacccatctgcaaacctgggctagaactcaacaagaaggatatcaccacctcagcagaccagattgctgaggtgaagaccatggagagtcacccacccatacctcctgtctttgtggaacatatggtcccacaagatgcaaatcagaaaggcctgtgtaccaaagaaagaatgatctgcttggagtttacttctagggaatttcatgctggacagattgaggatgaattaaacttaaatgacatcaatggatgctcatcagggtgttgtctgaatgaatcaaaatttcctcttgacaattgccatgcatccaaagccttaattcagcctggacatgtcccagaaatggccaacaagtttccagacttaacagtggaagatttggagacagatgcactgaaagcagacatgaatgtccacctactgcctatggaagaattgacatctccactgaaagacccccccatgtcccctgatcctgagtcaccaagcccccaacccagttgccagactgaaatctcagatttcagtacagatcgcattgacttttttagtgccctagagaagtttgtggagctctcccaagaaacccggtcacgatctttttcccattcaaggatggaggaactgggtggaggaaggaatgagagctgtcgactgtcagtggtagaagtagccccttccaaagtgacagctgatgaccagagaagcagctctttgagtaatactccccatgcatcagaagaatcttcaatggatgaggaacagtcaaaggcaatttcagaactggtcagcccagacatcttcatgcagtctcactcggaaaatgcaatttcagtcaaagaaattgtcactgaaattgagtccatcagtcaaggagttgggcagattcaactgaaaggagacatcttacccaacccatgccatacaccaaagaagaacagcatccatgagctgctccttgagagggcccagactccagagaacaaacctggacatatggagcaagatgaggactcctgcacagcccagcctgaactagccaaagactcagggatgtgcaacccagaaggctgcctaaccacacactcatctatagcagacttggaagaaggggaaccagctgagggggaacaagagctccagggctcagggatgcacccaggtgccaagtggtaccctgggtctgtgaggcgagccaccttggagttcgaagagcgcttacggcaggagcaagagcatcatggtgctgccccaacatgtacctcattgtccactcgtaagaattcaaagaatgattcttctgtggcagacctagcaccaaaagggaaaagtgatgaagcccccccagaacattcatttgtcctcaaggaaccagaaatgagcaaaggcaaagggaaatacagtgggtctgaggctggctcactgtcccattctgagcagaatgccactgttccagctcccagggtgctggagtttgaccacttgccagatcctcaggagggcccagggtcagatactggaacacagcaggaaggagtcctgaaggatctgaggactgtgattccataccaggagtctgaaacacaagcagtccctcttccccttcccaagagggtagaaatcattgaatatacccacatagttacatcacccaatcacactgggccagggagtgaaatagccaccagtgagaagagcggagagcaagggctgaggaaagtgaacatggaaaaatctgtcactgtgctctgcacactggatgaaaatctaaacaggactctggaccccaaccaggtttctctgcacccccaagtgctacctctgcctcattcttcctcccctgagcacaacagacccactgaccatccaacctccatcctgagtagccctgaagacagaggcagcagcctgtccacagccctggagacagcagcaccttttgtcagtcatacaacccatttactgtctgccagtttggattacctgcatccccagactatggttcacctggagggcttcacagagcagagcagcactacagatgagccctctgcagaacaggttagctgggaagaaagtcaggagagccctctctccagtggcagtgaggtgccatataaggactcccagctaagtagcgcagacctaagtttaattagcaaacttggtgacaacactggggagttacaggagaaaatggacccattgcctgtagcctgtcgactcccacatagctctagtagtgaaaacataaagagtctcagccacagccccggtgtggtgaaggagcgtgctaaagaaatcgagtctcgagtggttttccaggcagggctcaccaaaccatcccaaatgaggcgctcagcttctctcgccaaattaggttacttggacctctgtaaagactgcttaccagagagggagcctgcctcctgtgaatcccctcatctcaaactgcttcagcctttcctcagaacagactcaggcatgcacgcgatggaggaccaagagtccctagaaaacccaggtgccccccacaacccagagcccaccaagtcttttgtagaacaactcacaacaacagagtgtattgtgcagagcaagccagtggagaggccccttgtgcagtatgccaaagaatttggttctagtcagcagtatttgctccccagggcaggacttgaattgactagttctgaaggaggccttcccgtgctacagacccagggactgcagtgtgcatgcccagctccagggctggccgtggcaccccgtcagcaacacggcagaactcacccccttaggagactgaaaaaggcaaatgacaaaaaacggacaaccaaccccttctataataccatgtgattctgagcctacacatgtgactttctagaagaaatgtttgtaaaaggggcaggtgtaatatgtaaggaacatgcactttattggttaattttataatattttggtcattttactgtttctggtgcatgcagggtttgggtgtttttcagtgtgtatgtgtgtgtatatgtaaggggaaagagagattgatctggatggcaagaccgtttatcattttttatttaaaaaaatcaaacctcaaaaaagtcattttcagagaacacctttatcaaaggcaaattgctgtttttcagtcagctgccacctgcttctcattttgccctctgagaaaaggcatggtttcttaattgagggaaggaagcagattcggaggggtggagataaagctggggattggagatgttcccctgcctttgtgatgatggtttggtttccagacctgaggcatcgaatgggctaaaggtcagccagaagtcagagggctctcagccttcatccagccgcagccctttagagttcctgaaggaggcaggttccgctttgctttaaaagagggtcttccggtgttccagagtgtatcgttacagtaagacatgataatggccggctctgcaaatttatcatatagtttttttcccaagaaaattatttttgaaattaaaacaggaccccaaatgaaatccaagtggtcttctgtagaggaaagcatgataagaggaggaagacataaagttgggggtggagaggctgctgcccagaaactgctgggttggtgggatccacacagatgggcatcttggctctccctgccagaaaaatgtgctctgcagtgtcctcccaactgaaaacaacagtgacatgtttgaaaagcagcaatcgaaagtcagtgtgttcttgtaaaatgaatatgtatgtagggttttaacccttccattacttgaataattctttgggccttctgagtttaatggccatattttcttccagtttattttccttccccatgctgttgtccccatgctgcctatttttttaaatttcatagattatatttgaattgttacatatgtttaacatccattgaatgcaacgttttatttttggtattatcactgttaacacttttttttccttttcctggaaggtttgtcatttctctaaagtttgtacacagtatttatgtacataatattgtcactgtcttagtgtcttgttcatgttgtagggtaattttgatttattctttttaagaaggagtagagttgcaactggaaaacacagacaccagaaatgaaagtgttgggtgttgataggaatctgtacaatatgttgatggtggctgtagttgtttaaatggagacttccaatcaccagctcctgccaaattatgcattagtaactttttcctcagagacacccctaaaggctcccattaggtcacagcgtgactgaaagctgatttctctgtgagactgaaatcccagaacattgtttgccagtatctcaaccacagccaggaagtatatgtgagttgcccagagtggaagctcctagtagaggctgaaggccacaggggaggcctcagccaggggcaagtgcccacagtgactccatttaggatgctgtcgttttgctactgttgtggagatccttaacgcagcagcgcctgtcataaacaagcctcttgtagcttcttacagaaaacagatttagtctagcatgaaacacctctgcatctcattgaaactgaagaggcttgcagatttgctttcgttgatgtccacgttactgaggattgactgagtatagactggagacaggtttttggcttatcacagcactgaggaaaatacaaatgcacagactgtcagcatgatgtcagaggccagagtttggtgggggcagatggcagggcgacccaaaagatgcagaaaaggtagactggggccactgggtcttaagaggagctgtgaagttgtgtggaagccaaggctgggtctgacatccctgccaggaagcaggttggacagaaaccacttgctaaaagcgtctctatggtgcagtgattatgtgtaccctgtgctgttgctcagtagtctccttgaatgttcaagtatctcatccactcagttttgtgattcctggatatttgtgtgttgtaaagtgttttgttaggtggtatgaaccaatgtgaggaggcttgagacagggttatggatttccagagctcttccatgtagaataccctgccttcttgaagcagttccaccaccaatatgatggggaagggcaggaacttatggcagggtggggagagggtttgcctggaagttaagagagtggcatccacttgtggtaaccccttacgatgatgacatcccacacactaagaggtacaagcaggaccaaagttttggactgttccctcttctcccctccactgtgtttaatgttcactcactgcattaaataacaacaaagatgggacaaaacccactaatactgtggggaaaaaaaattttcaagagcagaggaaagtctttctgcctttttataattactttttttatcatttaatttacctgcctaaataaacatcttctacagaatatctgtcattcaaccatgccaaggagtttgtgccagccttttcagactcccagaattgggtgttcctgggttatttacatagctgagcagtgtccaggggaggtgcgcagtgaactgtcaaggactttccagactgtcttctcttcagacttttataatctccagtggcatctttcccttttcttttgttcatgacctgacctgaagcagcagatttgatagactggcaaagatgaataggaaaaactttgactcttgcccagtgcctgcctgcctctctctctctcctctctctctctctctttttaaaccaccatagactctcacttattttggaggagtgtatgtgcatgtgtacacatatgtacatatataaaaacagttgatgttttggtgtatggggtaaaagccccaggagcatacagaacttgagctgaacctggtcagtagaaagggaaaccccaaccctttcttgatttttggagacacccaggactaatggatactgtagtagacatgtagtactatagtaccgtaatattcatctctcctcattttagttgcctttcagattctaaatgtttgggatcattcctatcatcttagtctcttcaggatctttagtattttcctggttctgaggaggcttgagacagggttatggatttccttgttctgtgtctttatccctactgatagttcctctttctcattttgcaaactacccagagctccaaggacagcctgaagatctcagtgcctcaggctctgaggtactctgctcacaggccccagacagatgctgttgggtaaactcaaagcttcctatgagaagcttctgagatgtagcaggtcacagaagtgttcacctgtttcatctgaggatttcagttctgaagtgatctaggcatgtttggtaaaaatgtttttgtgagagttctttttttaagaaagcattatgcaaaaagtcacttttaagggcatttaaaaatttttaagtaaagccattctttggcttttttggactatttgtggatactttgtttacattttgaatattaaaatgtgcatcatcttgtcggccatgcagtcctgcaggcatcagtgccctggctgtcctgtgagtcctcatgcagagcagggccatcatggtcagcccttgtgagtaagtgggtatacgctgaagctgacttccgtctgtgtcctgccctcccatccagcactctctatggaaatagttgtcatttcctcagtgatggtgtgtcttatagtgatggttgtaatggtgaatggctagtgtcattttgtttaattttgttttgctttttgatggtggataagatgaaattttagctgtttcagcatcaatccaacttaaaagcatcttggactttgttttcccttccaaactaaaagatcaaggcatgtattagacacaagcatatttgctgcctcaactcctctgacacccatattaggaaaaggcctgccaccaaagcaggaagctgcacactcctaacccttctcccagggtgtggggtcccttgacgtcatgaagagctattgcaaggtgcttctgtacttttccagcctggaaatggagggtgactggccctggctcctgctatgagaagataaccagcctcattttctcagtgccccagaggtctaggataggatttctaaactggaatcatccttaatcaccttgaagatcccttaagaggcatttgactggtgctgccgtctgtgtcctcaaagcaatgctggtggcagcgtcctgtgtacacatgcagagctaatacccaaactaaaaactgggtaactggccctgaagtgcttcccaatcagtaagcccacagggaaatgtttgatttttatgttctgttggattttggtttgcttggcatatctaaaggtgcctttacttttctttttttttttttttctttctgctttgttttgtaggacttgttctaacatggaaaacaagtccagaagactctcctctgactgttacctttgccccaagccaccccaaacttttatgctcatgttttattaaagcaggtgctccctggaatctctgggacatttttgaggcatttgaagcagaatatagagtggtctcatctccttccttaatcttcctggtggttgggatgttccacttgtatcatagatttttttattacagatatgctccactgtttttaaatgtgaacttgtgcgcaaatgtgcagattcaatgttcttgttacagattgaataaatttttattttg

SEQ ID NO: 364 - DNA, 1557 bp, Homo sapiens
ggcagcgcgccggccgcgagagagggccccgtcgcgaccgcgtccccttgggtccttgatcctgagctgaccgggtagccatggccttgcggctcctgaagctggcagcgacgtccgcgtccgcccgggtcgtggcggcgggcgcccagcgcgtgagaggaattcatagcagtgtgcagtgcaaactgcgctatggaatgtggcatttcctacttggggataaagcaagcaaaagactgacagaacgcagcagagtgataactgtagatggcaatatatgtactggaaaaggcaaacttgcaaaagaaatagcagagaaactaggcttcaagcactttcctgaagcggggattcattatccagacagtaccacaggagatgggaagcccctcgccaccgactataatggcaactgtagtttggagaaattttacgatgatccgagaagcaatgatggcaacagttaccgcctgcagtcctggttgtacagcagtcgcctgctgcagtactcagatgccttggagcacttgctgaccacaggacaaggtgttgtgttggagcgctccatcttcagtgactttgtgttcctggaggcgatgtacaaccagggattcatccgaaagcagtgtgtggaccactacaacgaggtgaagagcgtcaccatctgcgattacctgcccccccacctggtgatttacatcgatgtgcccgttccagaggtccagaggcggattcagaagaaaggagatccacatgaaatgaagatcacctctgcctatctacaggacattgagaatgcctataagaaaacctttctccctgagatgagtgaaaaatgtgaggttttacaatattctgcaagggaagctcaagattcaaaaaaggtggtagaggacattgaatacctgaagttcgataaagggccgtggctcaagcaggacaatcgcactttataccacctgcgattactggttcaggataagtttgaggtgctgaattacacaagcattcctatctttctcccggaagtcaccattggagctcatcagactgaccgtgtcttacatcagttcagagagctgccgggccgcaagtacagccctgggtacaacaccgaggtgggagacaagtggatctggctgaagtgaacgggccgccttctgctccagctgcatcacagtgatggccaagctgcatcagccgcactctcctggacgccatatagctttaagatcgggggagggtaaataatgcaaaaattgcacagtggaagaaggggtctcacaaaaagcaatccatcctgtagtataggtaatggagttgggggaagcagcttccattctggatgtttggaaccctttagctttgttttggaatggcccaccattctcactggaaaacagtggtctgctgtgaaaggccagctctcggcagcccctgtggtttcagcgctgccgctctgtgtcattcaggttgtgcacattgtttttcttctgacttccagaaataaaagtgtttccatgggaaaaaaaaaaaaaaaaaaaaaaaaaaaaaaaa

SEQ ID NO: 365 - DNA, 3285 bp, Homo sapiens
atttccttctccctttccccgccagcttcgcatccatctcccccaccccgtaaccccctcctgcctccatccaccggggctatggccgcagaagaggtattgcagacggtggaccattataagactgagatagagaggctaaccaaggagctcacggagaccacccacgagaagatccaggctgccgagtacgggctggtggtgctggaggagaagctgaccctcaaacagcagtatgatgaactggaggctgagtacgacagcctcaaacaggagctggagcagctcaaagaggcatttgggcagtccttctccatccaccggaaggttgctgaagatggagagactcgggaggaaacgcttctgcaggagtcagcatcgaaggaggcttactatctggggaagatcttggagatgcagaacgagctgaaacagagccgggctgtggtcactaatgtacaggcagaaaacgagaggctcaccgcagtcgtgcaggatctgaaggagaacaatgagatggtggagctacagagaatacggatgaaggatgaaatccgagaatataagttccgggaggcacggctccttcaggactatactgaattggaagaagaaaatatcacattgcagaaactagtgtccacgttgaagcagaaccaggttgaatacgaaggcttaaagcatgagattaagcgatttgaggaggagacggtactgctgaacagccagctggaagatgccatccgattgaaagagattgctgagcaccaactggaagaagccctcgagactttaaaaaatgaaagagagcaaaagaacaacctgcggaaggagctctcccagtatatcagcctcaatgataaccatatcagcatctcagtagatggactcaaatttgccgaggatgggagtgaaccaaacaatgatgacaaaatgaacggtcatatccatgggcctcttgtgaaactgaatggagactatcggactcccaccttaaggaaaggagagtctctgaaccctgtctctgacttattcagtgagctgaacatttcagaaatacagaagttgaagcagcagcttatgcaggtagagcgggaaaaggccattcttttggccaacctacaggagtcacagacacagctggaacacaccaagggggcactgacggagcagcatgagcgggtgcaccggctcacagagcacgtcaatgccatgaggggcctgcaaagcagcaaggagctcaaggctgagctggacggggagaagggccgggactcaggggaggaggcccatgactatgaggtggacatcaatggtttagagatccttgaatgcaaatacagggtggcagtaactgaggtgattgatctgaaagctgaaattaaggccttaaaggagaaatataataaatctgtagaaaactacactgatgagaaggccaagtatgagagtaaaatccagatgtatgatgagcaggtgacaagccttgagaagaccaccaaggagagtggtgagaagatggcccacatggagaaggagttgcaaaagatgaccagcatagccaacgaaaatcacagtacccttaatacggcccaggatgagttagtgacattcagtgaggagttagctcagctttaccaccatgtgtgtctatgtaataatgaaactcccaacagggtcatgctggattactataggcagagcagagtcacccgcagtggcagcctgaaagggcccgatgatcccagaggacttttgtccccacgattagccaggcggggtgtgtcatccccggtagaaacaaggacctcatctgaaccagttgcaaaagaaagcacagaggccagcaaagaaccaagtccaactaagacccccacaatctctcctgttattactgccccaccgtcatctccagtattggatacaagtgacatccgcaaagagccaatgaatatctacaaccttaatgccataatccgggaccaaatcaagcatctgcagaaagctgtggaccggtccttgcaactgtctcgtcaaagagcagcggctcgggagctagcccccatgattgataaagacaaggaagccttaatggaagagatcctcaagctaaagtccctgctgagcaccaaacgggagcagatcgccacattgagggcggtgttgaaagccaacaagcagacagctgaggtggcgctagctaatctcaagaacaaatatgaaaatgaaaaagcaatggtgactgaaaccatgacgaagcttagaaatgaactgaaggctttgaaagaagatgctgcaaccttctcatccctgagagcaatgtttgcaacaagatgtgatgaatatgtcacccagttggatgagatgcagagacagttagcagctgcagaggatgagaagaagactctgaacactttgttacgaatggctatccagcaaaaactcgccctgacccagaggctggaggacttagagtttgaccatgagcagtcccgacgcagcaaaggcaaacttggaaagagcaagatcggcagccctaaaattgtcagcagcctgctgcctccgtaccgccacagtgctcacaactagccgggaggcaagactgcccaactgtcagtcctgacacagctctccctgaggagcagccacattccagctcccagtgcgcccctctccactgtctctccaagcctcctcacccctagtcttcatctcctgtggacgaacatctggggtggaagttttgtagccacacacaggatactgcccaagatccagcgggtgttttcttctcggttgttagatgtacaattggattaatgtccatcgttttggaagacgagagaaagttgagaagaacacgaagcacagaccctgatgtgataaaacattttgtggtttctctgagtcacagataaacttctgccatcaaatggctacagttcatttaaatttaaaaaaaagaaaaaagaaacagaaaacgtgtctcagatggctggctttacctcgatagcataagagagacctaagacatgtaaaatacgtatattgcagtatcatctttcctcacactccaaattcagctagggaagttgattccaatatgtttgtcattgatatttattttgtactttatttgctacatgatttatgtctatacaaataatttctctgaggtgaatttaattcatttattttcaaataagcataatttgctcaattaagtatgagtttgaatttagtttgaaatctggaattggccagactgtggtcatttttcttgca

SEQ ID NO: 366 - DNA, 6111 bp, Homo sapiens
aacaggtttgatctgtggatgaaatgaatcatgattttcaagctcttgcattagaatctcggggaatgggagagcttttgcctaccaaaaagttttgggaacctgatgattcaacaaaagatggacaaaaaggcatatttcttggggatgatgaatggagagagactgcatggggagcttctcaccattcaatgtcccagcctattatggtacagagaagatctggacagggttttcatggaaacagtgaagtaaatgcaatactgtctccgcgatcagaaagtggaggccttggtgtgagcatggtagaatatgtattaagttcttctcctgctgataaattggattctcgatttaggaagggaaattttggcactagagatgctgaaacagatggacctgagaaaggagatcaaaaaggcaaggcttctccatttgaggaggaccaaaacagagatcttaaacaaggagatgatgatgattctaaaataaatggcagaggtttgccaaatggaatggatgccgattgcaaagattttaatcgtactcctggaagtcgtcaagcctctccaactgaagtagttgagcgcttgggccccaatactaatccctcagaaggactggggcctcttcctaatcctacagctaataaaccacttgttgaagaattttcaaatcctgaaactcagaatctggatgccatggaacaagttggtctggaatccttacagtttgactatcctggtaatcaggtaccaatggactcttcaggagctactgtaggcctttttgactacaattcccagcagcagctctttcagaggactaatgcactaacagttcaacagttaactgcagctcaacagcagcaatatgcattagcagcagctcagcagccacatatagctggtgtattctcagcaggccttgctccagctgcatttgtgccaaatccatacattattagtgctgctcctccagggaccgatccgtatactgcagcaggattggctgcagcagctacattagcaggtccagcagtggttccacctcagtattacggcgttccatggggggtgtatccagccaacttatttcagcagcaagctgcagctgcggcaaataacacagccagtcagcaagcagcatcacaagctcagcctggacagcaacaggttctccgtgctggagcaggtcagcgtcctcttactcccaatcagggtcagcaagggcagcaagcagaatcacttgcggcagctgcagcagcaaatccaacattggcttttggtcagggtcttgctactggcatgccaggctatcaagtactagctccaactgcctattatgatcagactggtgccttagtggttggccctggagcaaggactggccttggagctccagttcggttaatggctccaacacctgttttaattagttcagcagcagcacaagctgcagcagcagcagcagctggaggaactgcaagtagccttacaggcagcacaaatggtctgtttcggccaattggcactcagccaccacagcagcagcaacagcagccaagcactaatctgcaatctaattcattttatggaagcagttctttgactaatagctcccagagtagttctttattttctcatggacctggtcaacctggaagtacatctcttggctttggaagtggtaactctttgggtgctgctataggctcagccctcagtggatttggttcatcagttggcagttctgcaagtagtagtgccacaaggagagagtctctatctactagctctgacttgtacaaaagatctagtagcagcctagcacccatagggcaaccattttacaatagtctgggattttcctcctctccaagtccaataggcatgcctctgccaagccaaactccaggacattcacttacgccaccgccatcactttcatcacatggatcctcatccagtttgcatttaggaggactgacaaatggtagtggtcgatatatctctgcagcacctggagcagaagcaaaatatcgaagtgcttcaagcacttccagtctatttagctccagcagccagctctttcctccttcccggcttcggtataataggtctgatattatgccttctggccgcagtagattattggaagatttcagaaacaaccgcttcccaaaccttcagcttagagacttgattggacatatagttgagttttctcaagaccagcatggttctagattcatacagcaaaaactagagagagctactccagctgagcgacagatggtatttaatgaaattctgcaagcagcctatcaattaatgactgatgtttttggcaactatgttatacagaagttttttgagtttgggagtctggatcaaaaattagccctggctactcgtattcgtggtcatgttctacccttagccttgcagatgtatggctgccgcgttattcagaaagcattagaatctatttcttctgaccagcagagtgaaatggtaaaggagctggatggtcatgtgctcaaatgtgtgaaagatcagaatggaaaccatgttgtacaaaaatgtatcgaatgtgttcagccacagtcactacagttcatcattgatgctttcaagggacaagtatttgtgctttcaactcatccttatggctgcagagtaattcagcgcatcctagagcattgcactgcagaacagaccttacctatcttagaagaactccaccaacatacagagcagttggtacaggatcagtatggcaattatgttattcagcatgtactggaacacggtcgacctgaagacaagagcaaaattgtttccgaaatcaggggaaaggttttagccctgagtcaacacaaatttgccagcaatgtagtagaaaagtgtgttactcatgcctcccgtgctgagagagctttactgattgacgaggtttgctgccagaatgatggtcctcacagtgccttatacaccatgatgaaggaccagtatgccaattacgtggttcaaaagatgattgatatggctgaacctgctcagagaaagataatcatgcacaagattcgacctcacattactactttgcgcaaatacacatacgggaagcatatactggccaagttggaaaagtattatttgaagaatagcccggacctaggacctattggaggaccaccaaatggaatgctgtaaattacaggagcaagagaaagaagataatttaaccatgtgaaaagaatttttttgtgtgtgaattatcaaaacacaactcaactatgaatcttcaatttttttttaaagcaaaactatttattgactttattcatccatttgtaaattttttaaggttcttgtgtatatttggggggtgggggatgaattataaattatattcagccctgagtggagacctatcagattggattgctggcaaagcacagaatgcctgtatatgatgtaactgtatcaaaaataaaaagctgtcacatattttgtaaatttttaccttgtaaagtcacaaaaatagtttttaaaggaaaaagtacagtattcttttaataaactggctcacagtctggtaggtctacaaccccatagcacaacaggtttatagagatgtatatagaattatagtccttatttttttcctttgcgtgaaaccttttataacagattaacaatcaactgcataaatattattaatattttaaaaagagttaagttgtattttgataattcacaaactatcatgcaaataacgagtaagtagacaagaataaagtggtttgagatgaaaagaacctaacattatttacagtagatgtggttttaatacaattactgccctaaaatgtctctggcaatgtacagaaatattgtatatacttacatatgtaattgttgtaagagttaaatacaaaatcatggtgacacttccaattaagtgcactaaatgaaaagttaagtcacttattaacttttcagtttggtttgcaatgagaaagagtggaaatttgtattttgttttgcttatagaattacagacatgttgaggaagtgttgagctttattttgctttttcatagaggcagaaagtaggaaccagatagagatgaaaaggggccactgaaaagtgaatttgatagctcagcatttaagcatgattacatattcagatagctctttttgctttctataaatatatgcattgtgtgtgtagtaatagatgtaagtttacactttgaaaggaaatcttgtttcaatgtttattataaaagccttgctaatttagtagtgatgctttccttggttgtacaggtgtacatttgtaaaccttcatgctgtaaatggaatttgttttatctctttgggatacatttgcattttagtgtacatttacgtccctgccctctttgacctggcaatatagtgttgtataatgtaaatttatttctccaaatcgagagtgattttttaaaaattttttatctttatatggtttcagaagtatgaaccagctttctttttattattgtgagatcattttgttttataacatagttgttgactgttaatatggacctgctagaatttggatcactttcaattgaagtcagggtattgtgcataatagaaagtattggactgagatatttggttaccatggaggccaatgcttttttcatcttattaaatgtgatgtgacttttttctttgtacagaagagtactgtatttttgaatagcctactcccaagtaagagcaaatctgtatgataacattttttcctctggacataagacataacagtaacacgatgtacatttacaagcggccttatgtacatttcccaacaatctttttaaggcaaaattgtgaccatatgtgtataattaaaatcgtttttaatcctttgcctatgaaaatattttggaaaaaaacttgctgtgtatattcagtttctgaaagataaagaaagtgctttgtattttgttgaagtcagtattttgtataaacatttatgttgacccacttatgttcagtgctgaaaactaaaatgaacatgctattctgtcagctgaatatggaagagatctttttttactagagatctgcagaagaaacgcaatcttctgagcacaatatggaatctaaaggttttatcacttagttgttcatattatgaacctaaaaataatggcataaagtttggggatgccaggcatactttttcatgtttggtgttgagttattttacttttctaacccaacattccttggtgagaccattaaatccaaacacttgtcaccgttccttctcatagtcactctgggtcatcagcatgtcccagtcactgcagcaacgccttgtgtttgtttcatttttttaaaacccacacaaagccgctgtctcactttttcctactttaccaacctcagagtatttcggcccgtatcgaacttttgttctcagtatcagcccatggtttcaggatcaaagctgtcatgttggagattggtaatggctttcctgtctttgtacagttgaattcctagtcttccttcatccttgccctctgttggcacaggcattatctctgcaattttagaaaatgacaagtagagaatactacattgagaaactaaaccctcttcttggggtcctgatactcattcccatttgtcccagtgctgacaacccaatcttcccaatactttcaggcctgctctacaaaagtacctgttcttgtagaaattttacagtctgccattttgggtgcccaccccaatttttaccttttagtaagttggcatgaaattttggtaaaatctgaaaatcacatttcagaataaaacaattgggcaaaactacctaggctttactcttgagtgtctccttttgatagggattgtttctggaccagtttgtctaagtcctggctcttattggttcatatgaaataatgttaacttcacttctttgtatattatgtataaattagaaaatgaaaaatgtgtgaataacattgtatgaaataaacctggtcttgtgtttttctctagataaaataaaaatctgtacctc

SEQ ID NO: 367 - DNA, 1552 bp, Homo sapiens
acggggggcgatgagccgatccttgggcgggtttgccccgccggagtaatccggaagaggcctcttattagggctctggtggcggcggtggcggacacttggggtctggacgcaacggcggcgggagcatgaacgcccctccagccttcgagtcgttcttgctcttcgagggcgagaagatcaccattaacaaggacaccaaggtacccaaggcctgcttattcaccatcaacaaagaagaccacacactgggaaacatcattaaatcacgtgcctgcttccccttcgccttctgccgtgattgtcagtttcctgaggcctccccagccacgcttcctgtacagcctgcagaactctgccccagagcacatcagctatgtgccccagctctcaaacgacaccttggcggggaggctcaccctgtccaccttcacgctggagcagcctctaggccagttcagcagccacaacatctctgacttggataccatctggctggtggtggccctcagcaacgccacccagagcttcacggccccacggacaaaccaggacatccctgctcctgccaacttctcccagaggggctactatctcacactgagggccaaccgggtgctgtaccagaccagaggccagctccatgtcctccgcgtcggcaatgatacccactgccaaccaacaaaaattggctgcaaccatcccctaccaggacccggcccctacagggtgaagttcctggtgatgaatgacgaaggacccgtggctgaaaccaagtggtccagcgacactcgcctgcagcaagcccaggcacttcgggctgtccccggcccccagagcccgggcaccgtggtcatcatcgccatcctgtctatcctcctggccgtcctcctcacggtcctcctggctgtgctcatatacacctgcttcaacagctgcaggagcacttccctatcaggcccagaggaggcagggagtgtgagaagatacaccacgcacctcgcgttcagcactcctgccgagggggcttcctgaggggttccagaggggcccacgtgtccctccacctcctccctggcccaggctgcagagcctgagctgggacacgccctgaagcttctggaccctgagagagattgtttcttttctttactatttttttttttttttttgagacggagtctcactctgtcgccaggctggcgcgatcttggctcactgcaacctctgcctcacgggttcaagcgattttcctgcttcagcctcctgagtagctgggactacaggcacacgccaccatgcccagctcatttttgtatttttagtagagatggggtttcaccatgttggccaggatggcctccatctcttgaccttgtgatccgcccgactcggcctcccaaaatgctgggattacaggcgtgagccatcaagtctggcgagagagattgtttctagatgagggtgggggcgggtgtccttagcccaaagcttgtgccagtctctatcagaaataaatgcccccaaaacctcaaaaaaaaaaaaaaaaaaa

SEQ ID NO: 368 - DNA, 2029 bp, Homo sapiens
gtggacgcgaggagccgggcgcttagaacagaggcttgcacaggtggagatgtggaagtctgtagtgggccatgatgtgtctgtttccgtggagacccagggtgatgattgggacacagatcctgactttgtgaatgacatctctgaaaaggagcaacgatggggagccaagaccatcgaggggtctggacgcacagaacacatcaacatccaccagctgaggaacaaagtatcagaggagcatgatgttctcaggaagaaagagatggagtcagggcccaaagcatcccatggctatggaggtcggtttggagtagaaagagaccgaatggacaagagtgcagtgggccatgagtatgttgccgaggtggagaagcactcttctcagacggatgctgccaaaggctttgggggcaagtacggagttgagagggacagggcagacaagtcagcagtcggctttgattataaaggagaagtggagaagcatacatctcagaaagattactctcgtggctttggtggccggtacggggtggagaaggataaatgggacaaagcagctctgggatatgactacaagggagagacggagaaacacgagtcccagagagattatgccaagggctttggtggccagtatggaatccagaaggaccgagtggataagagcgctgtcggcttcaatgaaatggaggccccgaccacagcttataagaagacgacgcccatagaagccgcttctagtggtgcccgtgggctgaaggcgaaatttgagtccatggctgaggagaagaggaagcgagaggaagaggagaaggcacagcaggtggccaggaggcaacaggagcgaaaggctgtgacaaagaggagccctgaggctccacagccagtgatagctatggaagagccagcagtaccggccccactgcccaagaaaatctcctcagaggcctggcctccagttgggactcctccatcatcagagtctgagcctgtgagaaccagcagggaacacccagtgcccttgctgcccattaggcagactctcccggaggacaatgaggagcccccagctctgccccctaggactctggaaggcctccaggtggaggaagagccagtgtacgaagcagagcctgagcctgagcccgagcctgagcccgagcctgagaatgactatgaggacgttgaggagatggacaggcatgagcaggaggatgaaccagagggggactatgaggaggtgctcgagcctgaagattcttctttttcttctgctctggctggatcatcaggctgcccggctggggctggggctggggctgtggctctggggatctcagctgtggctctatatgattaccaaggagagggaagtgatgagctttcctttgatccggacgacgtaatcactgacattgagatggtggacgagggctggtggcggggacgttgccatggccactttggactcttccctgcaaattatgtcaagcttctggagtgactagagctcactgtctactgcaactgtgatttcccatgtccaaagtggctctgcctccaccccctccctattcctgatgcaaatgtctaaccagatgagtttctggacagacttccctctcctgcttcattaagggcttggggcagagacagcatggggaaggaggtccccttccccaagagtcctctctatcctggatgagctcatgaacatttctcttgtgttcctgactccttcccaatgaacacctctctgccaccccaagctctgctctcctcctctgtgagctctgggcttcccagtttgtttacccgggaaagtacgtctagattgtgtggtttgcctcattgtgctatttgcccactttccttccctgaagaaatatctgtgaaccttctttctgttcagtcctaaaattcgaaataaagtgagactatggttcacctgtaaaaaaaaaaaaaaaaaaaaaaaaaaaaaaaaaaaaaaaaaaaaaaaaaaaaaaaaaaaaaaaaaaaaaaa

SEQ ID NO: 369 - DNA, 3111 bp, Homo sapiens
gtgcgggcgagcggcgacggcggcggcggcgggcacagattaattaaaagaagaatgaactataatccttgaaggtaactgggcaattttttaagtcggaggctgttcttactggtgtgaggatttacacacgtcttcagtttttcagcacagaccagcagaccatcatttttagaggaaatactccctctgccctcctttttggtttccttggtggtaaagattaaatttggttgcatcattttgacttgtgtttgagtctaggttttatggcacaaggaatggcataaacttttcatgtgttttggttaaaacaaaccagaccattgcattgaccctggacatctttaattgagaaattggtaactttattttaatatgtatatctgaagaattcaagaaaacaaaggcatcctcagaggtgtgcctcttttctttattattagaggcaaaacgaacaattttataggatttgtagtgaaattataccagattataaggagaaccaaaactaagtcgcaaaatttattaatttaaggggctctcgctttgaaagtttgagagtaagttacgataggcatttgtatccattcattactttcctcttttcaaataagcaactaaatagaaatgctaatctcagacttaattatttaacagaagagtgtaccatggaaaacctccagacaaatttctccttggttcagggctcaactaaaaaactgaatgggatgggagatgatggcagccccccagcgaaaaaaatgataacggacattcatgtaaatggaaaaacgataaacaaggtgccaacagttaagaaggaacacttggatgactatggagaagcaccagtggaaactgatggagagcatgttaagcgaacctgtacttctgttcctgaaactttgcatttaaatcccagtttgaaacacacattggcacaattccatttaagtagtcagagctcgctgggtggaccagcagcattttctgctcggcattcccaagaaagcatgtcgcctactgtatttctgcctcttccatcacctcaggttcttcctggcccattgctcatcccttcagatagctccacagaactcactcagactgtgttggaaggggaatctatttcttgttttcaagttggaggagaaaagagactctgtttgccccaagtcttaaattctgttctccgagaatttacactccagcaaataaatacagtgtgtgatgaactgtacatatattgttcaaggtgtacttcagaccagcttcatatcttaaaggtactgggcatacttccattcaatgccccatcctgtgggctgattacattaactgatgcacaaagattatgtaatgctttattgcggccacgaacttttcctcaaaatggtagcgtacttcctgctaaaagctcattggcccagttaaaggaaactggcagtgcctttgaagttgagcatgaatgcctaggcaaatgtcagggtttatttgcaccccagttttatgttcagcctgatgctccgtgtattcaatgtctggagtgttgtggaatgtttgcaccccagacgtttgtgatgcattctcacagatcacctgacaaaagaacttgccactggggctttgaatcagctaaatggcattgctatcttcatgtgaaccaaaaatacttaggaacacctgaagaaaagaaactgaagataattttagaagaaatgaaggagaagtttagcatgagaagtggaaagagaaatcaatccaagacagatgcaccatcaggaatggaattacagtcatggtatcctgttataaagcaggaaggtgaccatgtttctcagacacattcatttttacaccccagctactacttatacatgtgtgataaagtggttgccccaaatgtgtcacttacttctgctgtatcccagtctaaagagctcacaaagacagaggcaagtaagtccatatcaagacagtcagagaaggctcacagtagtggtaaacttcaaaaaacagtgtcttatccagatgtctcacttgaggaacaggagaaaatggatttaaaaacaagtagagaattatgtagccgtttagatgcatcaatctcaaataattctacaagtaaaaggaaatctgagtctgccacttgcaacttagtcagagacataaacaaagtgggaattggccttgttgctgccgcttcatctccgcttcttgtgaaagatgtcatttgtgaggatgataagggaaaaatcatggaagaagtaatgagaacttatttaaaacaacaggaaaaactaaacttgattttgcaaaagaagcaacaacttcagatggaagtaaaaatgttgagtagttcaaaatctatgaaggaactcactgaagaacagcagaatttacagaaagagcttgaatctttgcagaatgaacatgctcaaagaatggaagaattttatgttgaacagaaagacttagagaaaaaattggagcagataatgaagcaaaaatgtacctgtgactcaaatttagaaaaagacaaagaggctgaatatgcaggacagttggcagaactgaggcagagattggaccatgctgaggccgataggcaagaactccaagatgaactcagacaggaacgggaagcaagacagaagttagagatgatgataaaagagctaaagctgcaaattctgaaatcatcaaagactgctaaagaatagaaactgttaaagagattcatctgtgtattactgacaaggttttttttgtttgttgcttgctttggtaatcgaattctgaagaatttatctgcatgacgataactaggcattctatccatttgtagatcagagaaagtgaagagattatatattagtacttaaatttttacattttccaaatgaatgaaaatgtatgtttctttgtacttttttaaaaaaatcagcttagtaacaatactatatggtttcaactagtaggtaatctgcttatatttctaatgcaaacttaacaattgtgtactttttaaaagctgcaatatgtgatggaaaaaaaaaaaaaaaaaaaaaaaaaaaaaaaaaaaaaaaaaagaaaaaaaaaaaaaaa

SEQ ID NO: 370 - DNA, 3527 bp, Homo sapiens
agtgaccgccctttgccactccccctgcctcctctccgcctttaacttctcgggaagatgaggcagtttggcatctgtggccgagttgctgttgccgggtgatagttggagcggagacttagcataatggcagaacctgtttctccactgaagcactttgtgctggctaagaaggcgattactgcaatctttgaccagttactggagtttgttactgaaggatcacattttgttgaagcaacatataagaatccggaacttgatcgaatagccactgaagatgatctggtagaaatgcaaggatataaagacaagctttccatcattggtgaggtgctatctcggagacacatgaaggtggcattttttggcaggacaagcagtgggaagagctctgttatcaatgcaatgttgtgggataaagttctccctagtgggattggccatataaccaattgcttcctaagtgttgaaggaactgatggagataaagcctatcttatgacagaaggatcagatgaaaaaaagagtgtgaagacagttaatcaactggcccatgcccttcacatggacaaagatttgaaagctggctgtcttgtacgtgtgttttggccaaaagcaaaatgtgccctcttgagagatgacctggtgttagtagacagtccaggcacagatgtcactacagagctggatagctggattgataagttttgcctagatgctgatgtctttgttttggtcgcaaactctgaatcaacactaatgaatacggaaaaacacttttttcacaaggtgaatgagcggctttccaagcctaatattttcattctcaataatcgttgggatgcctctgcatcagagccagaatatatggaagacgtacgcagacagcacatggaaagatgcctgcatttcttggtggaggagctcaaagttgtaaatgctttagaagcacagaatcgtatcttctttgtttcagcaaaggaagttcttagtgctagaaagcaaaaagcacaggggatgccagaaagtggtgtggcacttgctgaaggatttcatgcaagattacaggaatttcagaattttgaacaaatctttgaggagtgtatctcgcagtcagcagtgaaaacaaagttcgaacagcacactatcagagctaaacagatactagctactgtgaaaaacataatggattcagtaaacctggcagctgaagataaaaggcattattcagtggaagagagggaagaccaaattgatagactggactttattcgaaaccagatgaaccttttaacactggatgttaagaaaaaaatcaaggaggttaccgaggaggtggcaaacaaagtttcatgtgcaatgacagatgaaatttgtcgactgtctgttttggttgatgaattttgttcagagtttcatcctaatccagatgtattaaaaatatataaaagtgaattaaataagcacatagaggatggtatgggaagaaatttggctgatcgatgcaccgatgaagtaaacgccttagtgcttcagacccagcaagaaattattgaaaatttgaagccattacttccagctggtatacaggataaactacatacactgatcccttgcaagaaatttgatctcagttataatctaaattaccacaagttatgttcagattttcaagaggatattgtatttcgtttttccctgggctggtcttcccttgtacatcgatttttgggccctagaaatgctcaaagggtgctcctaggattatcagagcctatctttcagctccctagatctttagcttctactcccactgctcctaccactccagcaacgccagataatgcatcacaggaagaactcatgattacattagtaacaggattggcgtccgttacatctagaacttctatgggcatcattattgttggaggagtgatttggaaaactataggctggaaactcctatctgtttcattaactatgtatggagctttgtatctttatgaaagactgagctggaccacccatgccaaggagcgagcctttaaacagcagtttgtaaactatgcaactgaaaaactgaggatgattgttagctccacgagtgcaaactgcagtcaccaagtaaaacaacaaatagctaccacttttgctcgcctgtgccaacaagttgatattactcaaaaacagctggaagaagaaattgctagattacccaaagaaatagatcagttggagaaaatacaaaacaattcaaagctcttaagaaataaagctgttcaacttgaaaatgagctggagaattttactaagcagtttctaccttcaagcaatgaagaatcctaacaatagagattgctttggtgaccatgataggaggaaacgaaacttgtaagattggaacagttgttatttttatgaaattactttaaatatgaattgtactaactgtacctaaatagcaaagccctgtgtagattctggtaatgatctgtctcagggtatgtgtatttttgaagagtgttatgtccttagttttaattttgagtaaagaaaaggctaaaatcatgaattagttacaagcaacagtaccaacttatgtgacccctgaggggtggggctgtgagctcttaatttgtttttgattctgaaaaactctgcttcctggcatccaggagttagagattgagcctttcatcttctttctcaaaactagtttttgatgctttctttcatgggaatagtcacttttttatttagtaaatcgcattgctggaaccaccaaggagtgtggaatgtccttgagtgtattatttatgcaagtcacagtcacgttgccatcatggcagctatgtgaaacactaataaatgtgtttttactttttattcccgttaaaactgatgtaaaacaggataaaggcttgttatagtcacttataagtatctgggtctaagtaatttccttagatgtttctaaagaaacattttcagctttgctcccattatgattccaataaggaacgctttcctagtgcaattttaggagtaaagtttgaagagataaaaatagccaaagataggagacgtctgaattttgaatgataaacagtgatgttttaaaaaagctgttgttcttcaggaggcatttgcctaggatattgctggattataccccattggaggcttttaattttatttgtatgaattttccaggatttcattaaaaattattattgtattttttaccttaatgaaagattttgggttcaaatatctttctatattaaaagctgattgagtctgtacatatgtaaattatgcctagtggaggttctgttgactttcttccccactgtggaagaggccagttttgcctccatttgcacattcatttcagttatttctgatccataaatataacatttacaaaattcttccttgagctggtggaaatgcctcaccagtttcctctttaatgaatcaaataaaatctttaactgatgttaaaaaaaaaaaaaaaa

SEQ ID NO: 371 - DNA, 12331 bp, Homo sapiens
acttccggtggggtgtcatggcggcgtctcggactgtgatggctgtggggagacggcgctagtggggagagcgaccaagaggccccctcccctccccgggtccccttcccctatccccctccccccagcctccttgccaacgccccctttccctctccccctcccgctcggcgctgaccccccatccccacccccgtgggaacactgggagcctgcactccacagaccctctccttgcctcttccctcacctcagcctccgctccccgccctcttcccggcccagggcgccggcccacccttccctccgccgccccccggccgcggggaggacatggccgcgcacaggccggtggaatgggtccaggccgtggtcagccgcttcgacgagcagcttccaataaaaacaggacagcagaacacacataccaaagtcagtactgagcacaacaaggaatgtctaatcaatatttccaaatacaagttttctttggttataagcggcctcactactattttaaagaatgttaacaatatgagaatatttggagaagctgctgaaaaaaatttatatctctctcagttgattatattggatacactggaaaaatgtcttgctgggcaaccaaaggacacaatgagattagatgaaacgatgctggtcaaacagttgctgccagaaatctgccattttcttcacacctgtcgtgaaggaaaccagcatgcagctgaacttcggaattctgcctctggggttttattttctctcagctgcaacaacttcaatgcagtctttagtcgcatttctaccaggttacaggaattaactgtttgttcagaagacaatgttgatgttcatgatatagaattgttacagtatatcaatgtggattgtgcaaaattaaaacgactcctgaaggaaacagcatttaaatttaaagccctaaagaaggttgcgcagttagcagttataaatagcctggaaaaggcattttggaactgggtagaaaattatccagatgaatttacaaaactgtaccagatcccacagactgatatggctgaatgtgcagaaaagctatttgacttggtggatggttttgctgaaagcaccaaacgtaaagcagcagtttggccactacaaatcattctccttatcttgtgtccagaaataatccaggatatatccaaagacgtggttgatgaaaacaacatgaataagaagttatttctggacagtctacgaaaagctcttgctggccatggaggaagtaggcagctgacagaaagtgctgcaattgcctgtgtcaaactgtgtaaagcaagtacttacatcaattgggaagataactctgtcattttcctacttgttcagtccatggtggttgatcttaagaacctgctttttaatccaagtaagccattctcaagaggcagtcagcctgcagatgtggatctaatgattgactgccttgtttcttgctttcgtataagccctcacaacaaccaacactttaagatctgcctggctcagaattcaccttctacatttcactatgtgctggtaaattcactccatcgaatcatcaccaattccgcattggattggtggcctaagattgatgctgtgtattgtcactcggttgaacttcgaaatatgtttggtgaaacacttcataaagcagtgcaaggttgtggagcacacccagcaatacgaatggcaccgagtcttacatttaaagaaaaagtaacaagccttaaatttaaagaaaaacctacagacctggagacaagaagctataagtatcttctcttgtccatggtgaaactaattcatgcagatccaaagctcttgctttgtaatccaagaaaacaggggcccgaaacccaaggcagtacagcagaattaattacagggctcgtccaactggtccctcagtcacacatgccagagattgctcaggaagcaatggaggctctgctggttcttcatcagttagatagcattgatttgtggaatcctgatgctcctgtagaaacattttgggagattagctcacaaatgcttttttacatctgcaagaaattaactagtcatcaaatgcttagtagcacagaaattctcaagtggttgcgggaaatattgatctgcaggaataaatttcttcttaaaaataagcaggcagatagaagttcctgtcactttctccttttttacggggtaggatgtgatattccttctagtggaaataccagtcaaatgtccatggatcatgaagaattactacgtactcctggagcctctctccggaagggaaaagggaactcctctatggatagtgcagcaggatgcagcggaacccccccgatttgccgacaagcccagaccaaactagaagtggccctgtacatgtttctgtggaaccctgacactgaagctgttctggttgccatgtcctgtttccgccacctctgtgaggaagcagatatccggtgtggggtggatgaagtgtcagtgcataacctcttgcccaactataacacattcatggagtttgcctctgtcagcaatatgatgtcaacaggaagagcagcacttcagaaaagagtgatggcactgctgaggcgcattgagcatcccactgcaggaaacactgaggcttgggaagatacacatgcaaaatgggaacaagcaacaaagctaatccttaactatccaaaagccaaaatggaagatggccaggctgctgaaagccttcacaagaccattgttaagaggcgaatgtcccatgtgagtggaggaggatccatagatttgtctgacacagactccctacaggaatggatcaacatgactggcttcctttgtgcccttgggggagtgtgcctccagcagagaagcaattctggcctggcaacctatagcccacccatgggtccagtcagtgaacgtaagggttctatgatttcagtgatgtcttcagagggaaacgcagatacacctgtcagcaaatttatggatcggctgttgtccttaatggtgtgtaaccatgagaaagtgggacttcaaatacggaccaatgttaaggatctggtgggtctagaattgagtcctgctctgtatccaatgctatttaacaaattgaagaataccatcagcaagttttttgactcccaaggacaggttttattgactgataccaatactcaatttgtagaacaaaccatagctataatgaagaacttgctagataatcatactgaaggcagctctgaacatctagggcaagctagcattgaaacaatgatgttaaatctggtcaggtatgttcgtgtgcttgggaatatggtccatgcaattcaaataaaaacgaaactgtgtcaattagttgaagtaatgatggcaaggagagatgacctctcattttgccaagagatgaaatttaggaataagatggtagaatacctgacagactgggttatgggaacatcaaaccaagcagcagatgatgatgtaaaatgtcttacaagagatttggaccaggcaagcatggaagcagtagtttcacttctagctggtctccctctgcagcctgaagaaggagatggtgtggaattgatggaagccaaatcacagttatttcttaaatacttcacattatttatgaaccttttgaatgactgcagtgaagttgaagatgaaagtgcgcaaacaggtggcaggaaacgtggcatgtctcggaggctggcatcactgaggcactgtacggtccttgcaatgtcaaacttactcaatgccaacgtagacagtggtctcatgcactccataggcttaggttaccacaaggatctccagacaagagctacatttatggaagttctgacaaaaatccttcaacaaggcacagaatttgacacacttgcagaaacagtattggctgatcggtttgagagattggtggaactggtcacaatgatgggtgatcaaggagaactccctatagcgatggctctggccaatgtggttccttgttctcagtgggatgaactagctcgagttctggttactctgtttgattctcggcatttactctaccaactgctctggaacatgttttctaaagaagtagaattggcagactccatgcagactctcttccgaggcaacagcttggccagtaaaataatgacattctgtttcaaggtatatggtgctacctatctacaaaaactcctggatcctttattacgaattgtgatcacatcctctgattggcaacatgttagctttgaagtggatcctaccaggttagaaccatcagagagccttgaggaaaaccagcggaacctccttcagatgactgaaaagttcttccatgccatcatcagttcctcctcagaattcccccctcaacttcgaagtgtgtgccactgtttataccaggtggttagccagcgtttccctcagaacagcatcggtgcagtaggaagtgccatgttcctcagatttatcaatcctgccattgtctcaccgtatgaagcagggattttagataaaaagccaccacctagaatcgaaaggggcttgaagttaatgtcaaagatacttcagagtattgccaatcatgttctcttcacaaaagaagaacatatgcggcctttcaatgattttgtgaaaagcaactttgatgcagcacgcaggtttttccttgatatagcatctgattgtcctacaagtgatgcagtaaatcatagtctttccttcataagtgacggcaatgtgcttgctttacatcgtctactctggaacaatcaggagaaaattgggcagtatctttccagcaacagggatcataaagctgttggaagacgaccttttgataagatggcaacacttcttgcatacctgggtcctccagagcacaaacctgtggcagatacacactggtccagccttaaccttaccagttcaaagtttgaggaatttatgactaggcatcaggtacatgaaaaagaagaattcaaggctttgaaaacgttaagtattttctaccaagctgggacttccaaagctgggaatcctattttttattatgttgcacggaggttcaaaactggtcaaatcaatggtgatttgctgatataccatgtcttactgactttaaagccatattatgcaaagccatatgaaattgtagtggaccttacccataccgggcctagcaatcgctttaaaacagactttctctctaagtggtttgttgtttttcctggctttgcttacgacaacgtctccgcagtctatatctataactgtaactcctgggtcagggagtacaccaagtatcatgagcggctgctgactggcctcaaaggtagcaaaaggcttgttttcatagactgtcctgggaaactggctgagcacatagagcatgaacaacagaaactacctgctgccaccttggctttagaagaggacctgaaggtattccacaatgctctcaagctagctcacaaagacaccaaagtttctattaaagttggttctactgctgtccaagtaacttcagcagagcgaacaaaagtcctagggcaatcagtctttctaaatgacatttattatgcttcggaaattgaagaaatctgcctagtagatgagaaccagttcaccttaaccattgcaaaccagggcacgccgctcaccttcatgcaccaggagtgtgaagccattgtccagtctatcattcatatccggacccgctgggaactgtcacagcccgactctatcccccaacacaccaagattcggccaaaagatgtccctgggacactgctcaatatcgcattacttaatttaggcagttctgacccgagtttacggtcagctgcctataatcttctgtgtgccttaacttgtacctttaatttaaaaatcgagggccagttactagagacatcaggtttatgtatccctgccaacaacaccctctttattgtctctattagtaagacactggcagccaatgagccacacctcacgttagaatttttggaagagtgtatttctggatttagcaaatctagtattgaattgaaacacctttgtttggaatacatgactccatggctgtcaaatctagttcgtttttgcaagcataatgatgatgccaaacgacaaagagttactgctattcttgacaagctgataacaatgaccatcaatgaaaaacagatgtacccatctattcaagcaaaaatatggggaagccttgggcagattacagatctgcttgatgttgtactagacagtttcatcaaaaccagtgcaacaggtggcttgggatcaataaaagctgaggtgatggcagatactgctgtagctttggcttctggaaatgtgaaattggtttcaagcaaggttattggaaggatgtgcaaaataattgacaagacatgcttatctccaactcctactttagaacaacatcttatgtgggatgatattgctattttagcacgctacatgctgatgctgtccttcaacaattcccttgatgtggcagctcatcttccctacctcttccacgttgttactttcttagtagccacaggtccgctctcccttagagcttccacacatggactggtcattaatatcattcactctctgtgtacttgttcacagcttcattttagtgaagagaccaagcaagttttgagactcagtctgacagagttctcattacccaaattttacttgctgtttggcattagcaaagtcaagtcagctgctgtcattgccttccgttccagttaccgggacaggtcattctctcctggctcctatgagagagagacttttgctttgacatccttggaaacagtcacagaagctttgttggagatcatggaggcatgcatgagagatattccaacgtgcaagtggctggaccagtggacagaactagctcaaagatttgcattccaatataatccatccctgcaaccaagagctcttgttgtctttgggtgtattagcaaacgagtgtctcatgggcagataaagcagataatccgtattcttagcaaggcacttgagagttgcttaaaaggacctgacacttacaacagtcaagttctgatagaagctacagtaatagcactaaccaaattacagccacttcttaataaggactcgcctctgcacaaagccctcttttgggtagctgtggctgtgctgcagcttgatgaggtcaacttgtattcagcaggtaccgcacttcttgaacaaaacctgcatactttagatagtctccgtatattcaatgacaagagtccagaggaagtatttatggcaatccggaatcctctggagtggcactgcaagcaaatggatcattttgttggactcaatttcaactctaactttaactttgcattggttggacaccttttaaaagggtacaggcatccttcacctgctattgttgcaagaacagtcagaattttacatacactactaactctggttaacaaacacagaaattgtgacaaatttgaagtgaatacacagagcgtggcctacttagcagctttacttacagtgtctgaagaagttcgaagtcgctgcagcctaaaacatagaaagtcacttcttcttactgatatttcaatggaaaatgttcctatggatacatatcccattcatcatggtgacccttcctataggacactaaaggagactcagccatggtcctctcccaaaggttctgaaggataccttgcagccacctatccaactgtcggccagaccagtccccgagccaggaaatccatgagcctggacatggggcaaccttctcaggccaacactaagaagttgcttggaacaaggaaaagttttgatcacttgatatcagacacaaaggctcctaaaaggcaagaaatggaatcagggatcacaacaccccccaaaatgaggagagtagcagaaactgattatgaaatggaaactcagaggatttcctcatcacaacagcacccacatttacgtaaagtttcagtgtctgaatcaaatgttctcttggatgaagaagtacttactgatccgaagatccaggcgctgcttcttactgttctagctacactggtaaaatataccacagatgagtttgatcaacgaattctttatgaatacttagcagaggccagtgttgtgtttcccaaagtctttcctgttgtgcataatttgttggactctaagatcaacaccctgttatcattgtgccaagatccaaatttgttaaatccaatccatggaattgtgcagagtgtggtgtaccatgaagaatccccaccacaataccaaacatcttacctgcaaagttttggttttaatggcttgtggcggtttgcaggaccgttttcaaagcaaacacaaattccagactatgctgagcttattgttaagtttcttgatgccttgattgacacgtacctgcctggaattgatgaagaaaccagtgaagaatccctcctgactcccacatctccttaccctcctgcactgcagagccagcttagtatcactgccaaccttaacctttctaattccatgacctcacttgcaacttcccagcattccccaggaatcgacaaggagaacgttgaactctcccctaccactggccactgtaacagtggacgaactcgccacggatccgcaagccaagtgcagaagcaaagaagcgctggcagtttcaaacgtaatagcattaagaagatcgtgtgaagcttgcttgctttcttttttaaaatcaacttaacatgggctcttcactagtgaccccttccctgtccttgccctttccccccatgttgtaatgctgcacttcctgttttataatgaacccatccggtttgccatgttgccagatgatcaactcttcgaagccttgcctaaatttaatgctgccttttctttaactttttttcttctacttttggcgtgtatctggtatatgtaagtgttcagaacaactgcaaagaaagtgggaggtcaggaaacttttaactgagaaatctcaattgtaagagaggatgaattcttgaatactgctactactggccagtgatgaaagccatttgcacagagctctgccttctgtggttttcccttcttcatcctacagagtaaagtgttagtcctatttatacatttttcaagatacaagtttatgagagaaatagtattataaccccagtatgtttaatcttttagctgtggactttttttttaaccgtacaaaactgaaagaaccatagaggtcaagcctcagtgacttgacaccataaagccacagacaaggtacttgggggggagggcagggaaatttcatattttatagtggattcttaagaaatactaacacttgagtattagcaataattacaggaaaataagtgcgaccacatatatcttaacattactgaattaaaactatggcttctaagtccttatccaaactcagtcatccaaactagtttatttttttctccagttgattatcttttaatttttaattttgctaaaggtggtttttttgtgttttgttttttgtaaaccaaaactatactaagtatagtaattatatatatatatatattttttcccctccccctcttctttcctaactaattctgagcagggtaatcagtgaacaaagtgttgaaaattgttcccagaaggtaattttcatagatgtttgcattagctccatagcaaaatggaatggtacgtgacatttagggtagctgatatttttattttgttaaataatttccaagaatagagtatggtgtatattataaatttctttgataagatgtattttgaatgtcttttaatcttcctcctcctctccaaaaaaatcagaaacctctttaagaaaacatgtaggttatatatgctagaattgcatttaatcactgtgaaaagactggtcagcctgcattagtatgacagtaggggggctgttagaattgctgctatactggtggtatggattatcatggcattggaattttcatagtaatgcagatccaatttctttgtggtacctgcagtttacaaaataatttgacttcagtgagcatattggtatctggatgttccaatttagaactaaaccatatttattacaaaaagatattaatccctctactcccaggttccctttatatgttaagatataatggctttgaggggggaaaaaataaacctaggggagaggggagtttcctgtagtgctgtttcattagaggatttcagtaaattaaattccacagctaattcaataaataatggtacatttaagtgttctgattttaataatatatttcacatttatccacacagtaacaatgtaatatgttaatgtaaataaaattggttttgatactcagaaataacaagaatttaattttttaaatttgtttacagtcctgggaaaagtaagaattatttgccaaaataagaggaaagaaaaccttagtattattaatgagtttaccatagaattgttggaaatactgaagacaggtgcaatttactaaacttttgtttttaaactattgtagaggctgcattagaagaaaatgtttataatgacagagcaactatgactatataaaaaagctgaaattagaactgtgtttagaaatagatcagtaacccagtgccaaggatgccaagctgccaccatggtcttggctctcccacaacccagtgtttctggggtaagtttcacagtttctaggccctggaatagcaggcagtgtaagcctttgataactttagttcgatgtttttcttgtttttgtttgttggtttggtgcatatgatagtgggtgttatgctattttgctcttcccatcaaaataaagaaacttccagaggtttactgttaaaaatactgatatttccataaacgggtttaccaagggtgtagtatttcataccgcctgaaatgatcagcattggcacaaatcaaaattcagccgcctttgaaatgcaaaaatacctttgactagtaagtacatcctaggagtttgaaaacttaactaaggtttaaaatttaccttgtttaaagaacttctgacttttgaggaaaatctagctttccaagtaactaaaatgtacatgagataaacctctcaccactatgtgtcccttgagaaatgcaacacttttttagtcttcatacttgtaatctataaaagaaattctgaagtttagaccaagttgcccatttctgcgtaattgacataagttctgttaaaaatattataagtaattcgtttcggtttgtagatgtttcccctgacttgttaaagaggaaaccaggaactcagtcatgtttttgtcctggataatctacctgttatgccagtactcccatccgaggggcatgcccttagttgcccagatggagatgcagttcagtagatttggggcaaagtggctacagctctgtcttccattcactcaacacctgttcatgactgagccaggtgcccaggacacatcctaaacagtcagcttctatcctgtgtcctagttggggagacagagtgccagccagcaaccctcccaggtttgtaggttttaggggttttcagttttgtttgggttttttgttttttgtttttgtttctacatccttccccgactcccaggcataatgaggcatgtcttactcaatgttatgcaatggatttaggcaaaaattcattcttagtgtcagccacacaattttttttaatgcagtatattcacctgtaaatagtttgtgtaaaatttgacaaaaaaagtatatttactatactgtaaatatatgtgatgatatattgtattattttgcttttttgtaaagcagttagttgctgcacatggataacaacaaaaatttgattattctcgtgttagtattgttaacttctttttgcgactgcgttacatcatttaaagaaaatgctgtgtattgtaaacttaaattgtatatgataacttactgtcctttccatccgggcctaaactttggcagttcctttgtctacaaccttgttaatactgtaaacagttgtacgccagcaggaaaaatactgcccaacagacaaaatcgatcattgtaggggaaaatcatagaaatccatttcagatctttattgttcctcaccccattttcctccttgtgtatgtacttcccccacccccctttttttaagtaaaatgtaaattcaatctgctctaagaaaaaaaaaaaaaaaaaaaa

SEQ ID NO: 372 - DNA, 2912 bp, Homo sapiens
aatcgcgcccgctccgacgtgtccaggtccgcggccccgggagcttggcgcggcccggcctggatgcgctgggcggagggtgcaggggagggcacggcgccgcttgcttggcctgcgcacccggacctagaagccgggacgagccggggcagagccaggcgcgcggaagtctgaaggtgccctccagacacggccccgatgactgaactacagcaagatgtggaagacacaaagcctgcgaaagtgctcgggaagagggagagcaaacttggctcagcccactcagaggctgagaatggtgtggaggagaaaaagaaagcctgcaggtcgccaacagcccaatcccctaccccatctgtggaggcggactccccagaccagaagaaaatcattagcctatggtcaaaatccagttttgatggtgcctctttagcaagtgataagaacgactgtaaaacagaaagcaaaaatgaccctaagactgaaagaaaaaagtcttcatcttccagccagtacaaggccaatatgcactttcacaagttgtttcttagtgtcccaacggaggaaccactgaagcaaagctttacctgtgctctacagaaagaaatactataccaaggaaagctctttgtatcagaaaactggatttgttttcattccaaagtctttggaaaagacacaaagatctctattccagctttctcggtaaccctaataaagaaaaccaaaactgctcttctagtgccaaacgccctgatcatagcaacagtcacagacaggtacatatttgtctccttactctccagagattcaacttacaaactactaaaatctgtgtgtggacacttagaaaatacaagtgttggtaacagtcccaatccatcttctgctgaaaacagtttccgagcagaccgcccttcatctctgcctctggatttcaatgatgaattctcagatctggatggagtggttcaacgaagaaggcaagacatggaaggatatagtagttctggttctcaaactcctgaatctgagaactctcgagatttccatgcgacagaatcccaaacagttctgaatgtctccaagggagaagcaaagccaactcgggcagatgcccatgtgaacagagtacctgaaggaaaagccaagagtctccctgtacagggtctgtcagaaactgttggaatcttacataaagtcaagtctcagaaatgtccgatgcttcaccatattcttatattctatgcaattgttgtctgtgcactaatcatctcgaccttctacatgagatacagaattaatactctggaggagcagctggggttactaacctccattgtggacacccataatactgaacaggcagcaccatctggcctgaggtcacaagtacaattcaatgtggaggttctctgtcaagagcttacagctaacatagtgaaattagaaaagatacaaaataacttacagaagttgcttgagaatggtgactgatcgaccagattgcttgggccatcggaatacctcatgtttccctttgaagaaggtgcttcccgaggcgttttgtttgagtgcaccctgctggtcagaggtgcaagcagatgagaatccagacattgcatgtggaggtctccagctcaggaaagtggggagggaaataattttggttcttgtgcaataaaagttgaccttgactctctgaggaagattttgctgcttttgcctgaagaaaacagacccatctctggaggtctcaggaagggcccagcgaacacactctcttggataattaccacgatggcgtcagcaaacactccaccctgtgcctttttagtccttcccgccctcctgcctctcccttacacccctcttaacgactttcaaactaaaggatacatcatatactgacaaactcaatgtggtcctttcaagaattagccatgagtctcaaaaaggcaataaatggctctaagtggacaggtttgcttcaaacaagtaacatctacattttgtcttttttttttcagttctcctgttatgttctggttgaaatcacctgtgtgtcttaatttctcaattcctttttggcaagaatatcaagcaaggtgaatttaacattatgtttatgttttgttttgttgctgtaactaatagttaattggactgattcttacccagccctggtcaagaatctgtgaggcatgtgactgaagtactaaattaaacttattttgaaaccaaacctaatttttaagccaaaaggtgtaatagtgatttaatacaggatgaaaaacactgaatttttaagactgtaggtggactatgttagtagttttcaagcaggatgtctgtattcagcattcaataatgctaaaatccctttcagcatgaaatttgtatgtttttatcctttgctgactaaaataaaataactggtggtttgctaactatttaccatatgggttggctggtttttattaataattgtttagggtatcataagatctgtaagtacaaaggatattctgtttctatctgcaatgcatttgataatcatttctatgaaatgtattttatttaatcagataagctaataagcgaattggttacatcgtttgtatctgttggcctagtggacagctgtgcctggtgcacctctggcttttaataaatactcattggttgaaacaccctgctaacactgtgttttgtcagttcgtaaattcctttaaccaagacttaactatgctttttaactctttttccacctgccatctactactaccaactcacttatacttccttcctcccaagtaatcatttcaaaactaaaaaaggatttaagttcttgggttacaacggtttaaaggaaagaaaatgaactttgaagtcaaaaaaaaaaaaaaaaa

SEQ ID NO: 373 - DNA, 2457 bp, Homo sapiens; identical to SEQ ID NO: 62

SEQ ID NO: 374 - DNA, 4442 bp, Homo sapiens; identical to SEQ ID NO: 273

SEQ ID NO: 375 - DNA, 3147 bp, Homo sapiens
aggcgtctgaggggcggacggaggcggcggcggcggcggcgggagcgggagcgggcggcgagtggggagcggggccgggagtggagcagccgccgcggcgggactggaccgagcctcgccggcgcgcacctgcccgcagcgcccgcggagcgcgcagcgcggcccgagcgcgacgacctgccgagcggcggccgaggcggcggtgtgggcgcgtcaggccgcgacgagggcgctgagacaaatttacatgtattggagaccagaccagaagcccttctgaattaagatctcacattcttgaaggtggcattgaagagcactaagatcggaagatgagtgagcttgaccagttacggcaggaggccgagcaacttaagaaccagattcgagacgccaggaaagcatgtgcagatgcaactctctctcagatcacaaacaacatcgacccagtgggaagaatccaaatgcgcacgaggaggacactgcgggggcacctggccaagatctacgccatgcactggggcacagactccaggcttctcgtcagtgcctcgcaggatggtaaacttatcatctgggacagctacaccaccaacaaggtccacgccatccctctgcgctcctcctgggtcatgacctgtgcatatgccccttctgggaactatgtggcctgcggtggcctggataacatttgctccatttacaatctgaaaactcgtgaggggaacgtgcgcgtgagtcgtgagctggcaggacacacaggttacctgtcctgctgccgattcctggatgacaatcagatcgtcaccagctctggagacaccacgtgtgccctgtgggacatcgagaccggccagcagacgaccacgtttaccggacacactggagatgtcatgagcctttctcttgctcctgacaccagactgttcgtctctggtgcttgtgatgcttcagccaaactctgggatgtgcgagaaggcatgtgccggcagaccttcactggccacgagtctgacatcaatgccatttgcttctttccaaatggcaatgcatttgccactggctcagacgacgccacctgcaggctgtttgaccttcgtgctgaccaggagctcatgacttactcccatgacaacatcatctgcgggatcacctctgtctccttctccaagagcgggcgcctcctccttgctgggtacgacgacttcaactgcaacgtctgggatgcactcaaagccgaccgggcaggtgtcttggctgggcatgacaaccgcgtcagctgcctgggcgtgactgacgatggcatggctgtggcgacagggtcctgggatagcttcctcaagatctggaactaacgccagtagcatgtggatgccatggagactggaagaccattccaacttggacgcgttaccatgagagcatatcctatccaaccgtactaacgtggacaccctacacctcccctcagaacttcaaaagggcaagatcttttttccttcacttattgctgaaaccaagagcacaattcccattgagagaaagatctctgtgctgtaaactaaaacaaattgtgcattccttccggggccatcgtctttgttttcttttttgtcttgaatgaattttaaaaggaaatatataataaaaatgttaaccagaaggtaaacttgagtgtaattgtcagacagacacacttttccaccagtgtatttgaattttagaccagtgaccctgttttgtggcattcatgcaaaacatgctgagggctttgttcatctggtcatcgtgtccaaatttcagtcatgtttgtagcaagattttggaagcattcatatttcctttttaaaatgtattcctttgtgttcaacagttaatcaaaaccagagagtctagggcagcctctctgatgttgtcaatgatgtaaattcagtccctggtttttaattttctgtctgatgtcacagatcattgttgcacacaaacgtggcatagaaaagaacatgttcagaagccatggggccaagcacatgcggggacggtctcaaatgcgtgatcagagaatccttcacctttgctgaaaagtgagctcagatccagcaccatgttcctcctgacccatcctgtctatcttctcagttgagtttttaatctcactttgggtttccttgtgaagttggagggaagtttataatagcctaacactaccccacccccaactaggaggaacctctgttttcaagagagatgcctgtcctgtgcttggatagtcagtcaattatttgtgtatgaaacaatgtacaaatcaatgttttgaaaataatgatctcagactttctaagttaaattttaaaaattttgattgtttgccatattgggtgggtttactcttagaatcgcatgctgtagaaatgctcaaaagtgcatatgggactcagtccttaggtgttctttttcttttaagaaataacctcttacagttgtaaccattgcggctctgtccacttctcgttgctgctctgtggcacatatcggaagcagtacagcgcgcggctctacacgcttgggtagcgggataagtcactgttttctttatttctttaaaaaaaaaaaagttctgttgcaaacgactgctgttggattctgagggtggggagggagagagagggagggagagggagtgaagagcctgccctcctatatggattcttcagggccctccacatctgaggtggctcattcccatcacacacagattgtcctggtgttcatttcaaggccagtgttcagcagcagcgtttggaaagcaggttctgtgggaccccccgccccgccccccgcactccttcatagcagcagtagtggcttctccatcctgttttctgcaacattctatacaaaactgtgctgtgaccttgcggtaggcctggatctggcaaagagaatacaaatgaaaccccttctttctctttccgtccaacaactctgtagagctctctgcacccttacccctttccaccttttgtatttaattttaaagtcagtgtactgcaaggaagctggatgcaagatagatactatattaaactgtactgttatttaagatgtaataaagcagtttgacatgaaaaaaaaaaaaaaaaaaaa

SEQ ID NO: 376 - DNA, 1126 bp, Homo sapiens
atatatcagaccatcagaaggatttgtataaagagtgactctcctatgaaggtaaaggccacccctcttcagttccagtgactgagatacatttttccaatcctgggggcaaatacagacacagcaagttccttcttccctttggaaatttggcagctgccttcaccagtgagcacaaagccacatttcaaaggaaactgacaaattatccccagctgccagaagaagaaatcctcactggacggcttcctgtttcctgtggttcattatctgattggctgcagggatgaaagtttttaagttcataggactgatgatcctcctcacctctgcgttttcagccggttcaggacaaagtccaatgactgtgctgtgctccatagactggttcatggtcacagtgcaccccttcatgctaaacaacgatgtgtgtgtacactttcatgaactacacttgggcctgggttgccccccaaaccatgttcagccacacgcctaccagttcacctaccgtgttactgaatgtggcatcagggccaaagctgtctctcaggacatggttatctacagcactgagatacactactcttctaagggcacgccatctaagtttgtgatcccagtgtcatgtgctgccccccaaaagtccccatggctcaccaagccctgctccatgagagtagccagcaagagcagggccacagcccagaaggatgagaaatgctacgaggtgttcagcttgtcacagtccagtcaaaggcccaactgcgattgtccaccttgtgtcttcagtgaagaagagcatacccaggtcccttgtcaccaagcaggggctcaggaggctcaacctctgcagccatctcactttcttgatatttctgaggattggtctcttcacacagatgatatgattgggtccatgtgatcctcaggtttggggtctcctgaagatgctatttctagaattagtatatagtgtacaaatgtctgacaaataagtgctcttgtgaccctcatgtgagcacttttgagaaagagaaacctatagcaacttcatgaattaagcctttttctatatttttatattcatgtgtaaacaaaaaataaaataaaattctgatcgcat

SEQ ID NO: 377 - DNA, 4006 bp, Homo sapiens
actcagacacgcagctggaccggacagggcggcttccgggtttggcgcggcctttgtctcttgctgcagccggagctccggtctcgtcttcactgctgtttgtcctctgctcctagaggcccagactctgtggctctgtgacctgcaggtattgggagatccacagctaagactccaggaccctctggaagcctagaaatgggaccattgacatttatggatgtggccatagaattctctctggaggagtggcagtgcctggacacagcacagcagaatttatataggaatgtcatgttagagaattatagaaacctggtattcctgggtattgctgtgtctaatttagacctgatcacctgtctggagcaaggaaaagagccctggaatatgaagagacacgagatggtagccaaacccccagctatgtgttctcattttgccaaagaccttaggccagagcaatatataaaaaattctttccaacaagtgatactgagaagatatggaaaatgtggatatcagaaaggctgtaaaagtgtggatgagcataagttgcacaaaggaggtcacaagggacttaaccagtgtgtgacaactacccagagcaaaatagttcagtgtgacaaatacgtgaaagtctttcataaatattcaaatgcaaagagacataagataagacatactggaaaaaatcctttcaaatgtaaagaatgtggcaaatcattttgcatgctttcacaactaactcaacatgagataattcatactggagaaaaaccctacaaatgtgaagaatgtggcaaagcttttaaaaagtcctcaaaccttacgaatcataagataattcatactggagagaaaccctacaaatgtgaagaatgtggaaaagcttttaaccagtcctcaactcttactagacataagataattcatactggagagaaactctacaaatgtgaagaatgtggcaaagcttttaaccggtcctcaaaccttactaaacataagatagttcatactggagagaaaccctacaaatgtgaagaatgtggcaaagcttttaaacagtcctcaaaccttactaatcacaagaaaattcatactggagagaaaccctacaaatgtggagaatgtggcaaagcctttaccctatcttcacaccttactacacataagaggattcatactggtgagaaaccctacaaatgtgaagaatgtggcaaagcttttagtgtattttcaacccttactaaacataagataattcatactgaagagaaaccctacaaatgtgaagaatgtggcaaagcttttaaccggtcctcacaccttactaatcataaggtaattcatactggagagaaaccctacaaatgtgaagaatgtggtaaagcctttaccaagtcctcaactcttacttatcataaggtaattcatactggaaagaaaccctacaaatgtgaagaatgtggtaaagcctttagtatattctcaatccttactaaacataaagtaattcatactgaagacaaaccctacaaatgtgaagaatgtggcaaaacttttaactactcctcaaattttactaatcataaaaaaattcatactggagagaaaccctataagtgtgaagaatgtggcaaaagctttattctgtcctctcatcttactacacataagataattcatactggagagaaaccctacaaatgtaaagaatgtggcaaagcttttaaccagtcctcaacccttatgaaacataagataattcatactggagagaaaccctacaaatgtgaagaatgtggcaaagcctttaaccagtccccaaaccttactaaacataagagaattcataccaaagagaaaccctacaaatgtaaataatgtgtcaaatcctttagtgtattttcaacttttattaaaacacaagataattcatactggagagaaatcctacaaatgtgataaatgtggcaaagcctttaactggctcttaatccttatgaaacaaaagataattcatactagagagaaaccctacaaatgtaaagaatgtggcaaagcatttaactggtccctaaatcttactaaacataaaaaaacttaaactggagagaaactacaaagctggaagacatcacagtaattctgacaacacctcaaacttttctaaacataaaataaatcatactggtgaggaactttaaaaatgcgaaaaatgtgacaaaatctttaaatgattgtcacacttgattgtaggtaagataattcttactagaaaaactcttacaagtgtgaagaatgtggcaaaatttttaatgaatactcacaccttattgccaggaaagcatttatacttgagaaaaattgtaccaatataaagactgtgaaaaagccattaatgtctgctcacatcttactcaacatcagagagtacttaaaaaaagtattataaatttaattactgtcaaaaagtatttcagaaaatataagcttttaaagtatttattttgaagacaaacattacaaataaaagagggttgtaatacctttatttgtatcacagatcttattgtacacattttgtactagagaaaaccctgaagcagttacttaaactttgttcaacatcagggaattcagattggagaaaaaccctgcaaatgtaataaatttgaaaaaaaagttttccaaaactacaacttagacaacaccagagggttcatactgagatatatttttgcagatgcagtatatatttaaaacatttaatccaaaataagtctatgtaaatatcagagaattcacagtggaaatatctaaggtagggccgggcatggtggctcacgcctgtagtgccagcactttgggaggctgaggtgggcagatcatgaggtcaacagattgagaccatcctggtcaacatggtaaaaccctgtctctactaaaaatacaaaaattagctgggcgtggcggcacgtgcctgtggtctcagctacttgggacgctgaggcaggaaaatccgttgaacccaggaggcagaggttgtagtgagccgggattgcaccactgcactccagccgggtgacagagtgagactccatctcaaaaacaaacaaactaaggtatggatgcttcagacattacactatatcaaagtgctgactgttaaaaatgatcccaaactaacggtagataaatttatttgtacataactttaaaaggagtagaagattttttggaagtttgtaattacattcaaagtatactttttttgtttgtttgttttccttgagacagagtctctctctgtcgtccaggctggagtgcagtggcacagtctcggctcgctgcagcctctgcctcctgggttcaagcaattctcctgcctcagcctactgagtggctgagattacaggtgcacaccaccacgtccggctgacttttgtatttttagtggggacggggtttcaccatgttggtcagggtagtcttgaactcctgacctcatgctctgcccagcttggcttcccaaggtgctgtgattacaggcttaagccacagcgcccgacccaaagtgttcttttttccttgaaaagaagtacagattttttaaaaagctaatattgctgtgattcaactctcaagttacttgatgctatttcttcatttctattgtattcacatgtgaaagcatgtgatcagttgtcacggcatcaaagataggagagtttctttttttttaggtgggcattatttatgaccttttctttggaagagtaaggatattaaaatgtaacatgcatgatgaaaatctaagtggagatgatatttgtggttaattatgatattgagtggtgcatgaggtaggtgtttagagtaatattcttttgcattatagtaagaacatttaagttttgttaaaattaaaaaattagtagtacgttattttactatttgtacttttatgtaataaaatgcagtacatttttaaattttc

SEQ ID NO: 378 - DNA, 2711 bp, Homo sapiens
ggtgctgcggcccgcgccgccatcttggattttactctccatttttctctggaattatttttggtgattaattttctgggggggactgggacgcggggcccggcggcgcggccccgcatcgcagcggccgggcagcggggcctgggacgcgccccgaggaggagcggggcggcgcaggcggagagaacattgaaagtattctctaagctatttgaagagagtgactaaatgcacctgggtcaggctgtctgtgggtatgaagtggttgggagaatccaagaacatggtggtgaatggcaggagaaatggaggcaagttgtctaatgaccatcagcagaatcaatcaaaattacagcacacggggaaggacaccctgaaggctggcaaaaatgcagtcgagaggaggtcgaacagatgtaatggtaactcgggatttgaaggacagagtcgctatgtaccatcctctggaatgtccgccaaggaactctgtgaaaatgatgacctagcaaccagtttggttcttgatccctatttaggttttcaaacacacaaaatgaatactagcgcctttccttcgaggagctcaaggcatttttcaaaatctgacagtttttctcacaacaaccctgtgagatttaggcctattaaaggaaggcaggaagaactaaaggaagtaattgaacgttttaagaaagatgaacacttggagaaagccttcaaatgtttgacttcaggcgaatgggcacggcactattttctcaacaagaataaaatgcaggagaaattattcaaagaacatgtatttatttatttgcgaatgtttgcaactgacagtggatttgaaatattgccatgtaatagatactcatcagaacaaaatggagccaaaatagttgcaacaaaagagtggaaacgaaatgacaaaatagaattactggtgggttgtattgccgaactttcagaaattgaggagaacatgctacttagacatggagaaaacgacttcagtgtcatgtactccacaaggaaaaactgtgctcaactctggctgggtcctgctgcgtttataaaccatgattgcagacctaattgtaagtttgtgtcaactggtcgagatacagcatgtgtgaaggctctaagagacattgaacctggagaagaaatttcttgttattatggagatgggttctttggagaaaataatgagttctgcgagtgttacacttgcgaaagacggggcactggtgcttttaaatccagagtgggactgcctgcgcctgctcctgttatcaatagcaaatatggactcagagaaacagataaacgtttaaataggcttaaaaagttaggtgacagcagcaaaaattcagacagtcaatctgtcagctctaacactgatgcagataccactcaggaaaaaaacaatgcaagtaagtaagggagatttgataagcatatcttttaaaagtattttcacacaatttgctttataaagtgtgcttcagtagttttaaacttttaaatactcagagagactgggacttgtgagctttggctgcacttcaaggctctagacgtgatttgagtagaggcacagtctgtatcccatctctaacttcagtaccgtcctctagactatttttcttgaataccttggtaactggatatgagttcttcatcatatgttccaaggtcatcatatgttttaaacattttcaaggtgttagagactgtgatgatgtcgctaagtcctgcaagaagacaaaaggactgagtagaattaaattagactctatacattccagtgcctagccagtttgttagaaaagatgatggacttggggaattcatagcttctggccttaaggcttccaccttttcattgcttgctgacctttttcaaaacgaactgactcagttcagcagaccaccagtaccagactcagaattgtgatagaggagcattttgaacagtgccgtattgtgacatgctgtattggctactccagaaagtaggagtaaagatggaaaggagaaagaagcaacctctgagattccagtggtgtgtgggggcaagatctgatggaaactgaaaaagagaacgaagactaaacaaagagaaaggaaagagaagaaaccctaaatgggcaaaggaaagcacatcctgtttgcggagctttgaaatattggaaccatttctaattgctcctgtttttctgggtaacaccagttttctgtagttgccactaaagcagtagactcttgagtctcacttgtctctgagagagacagaagttagaaagttttgacttggcgattccgaaagtatgcctttgttggcacttaaatgtccagtgagacttcttggcaccttagagccctctgagatactgattattttaggttcttctccctactttcagatgttttcagcccaacactgggtgctctcttccactacagagaatcctgaagaaaagggaaggtgtttcccatgatggtgaatgtcactgccatgaattcctgaatctacctgctgctgggagtcagagtccaagcataacccgtgtagcataaaagcagcgctgtagccctattccagtctttttcgttaatgtccagagtgaacaacaagagttagtcaatcattaactgttgactgttgattctcataataaatgcagcataacgacaaaaaaaaaaaaaaaaaa

SEQ ID NO: 379 - DNA, 13302 bp, Homo sapiens
gaagcgcctgtgctctgccgagactgccgtgcccattgctcgcctcggtcgccgccgctttagccgcctccgggggagcggccgcctattgtctttctccgcggcgaaggtgaagagttgtcccagctcggcccgcgggggagccccgggagccgcacgtgtcctgggtcatgaaacttaatccacagcaagctcccttatatggtgattgtgttgttacagtgctgcttgctgaagaggacaaagctgaagatgatgtagtgttttacttggtatttttgggttccaccctccgtcactgtacaagtactcggaaggtcagttctgatacattggagaccattgctcctggtcatgattgttgtgaaacagtgaaggtgcagctctgtgcttccaaagagggccttcccgtgtttgtggtggctgaagaagactttcatttcgtccaggatgaagcgtatgatgcagctcaattcctagcaaccagtgctggaaatcagcaggctttgaactttacccgttttcttgaccagtcaggacccccatctggggatgtgaattcccttgataagaagttggtgctggcattcaggcacctgaagctgcccacggagtggaatgtattggggacagatcagagtttgcatgatgctggcccgcgagagacattgatgcattttgctgtgcggctgggactgctgaggttgacgtggttcctgttgcagaagccaggtggccgcggagctctcagtatccacaaccaggaaggggcgacgcctgtgagcttggccttggagcgaggctatcacaagctgcaccagcttctaaccgaggagaatgctggagaaccagactcctggagcagtttatcctatgaaataccgtatggagactgttctgtgaggcatcatcgagagttggacatctatacattaacctctgagtctgattcacatcatgaacacccatttcctggagacggttgcactggaccaatttttaaacttatgaacatccaacagcaactaatgaaaacaaacctcaagcagatggacagtcttatgcccttaatgatgacagcacaggatccttccagtgccccagagacagatggccagtttcttccctgtgcaccggagcccacggaccctcagcgactttcttcttctgaagagactgagagcactcagtgctgcccagggagccctgttgcacagactgaaagtccctgtgatttgtcaagcatagttgaggaggagaatacagaccgttcctgtaggaagaaaaataaaggcgtggaaagaaaaggggaagaggtggagccagcacctattgtggactctggaactgtatctgatcaagacagctgccttcagagcttgcctgattgtggagtaaagggcacggaaggcctttcgtcctgtggaaacagaaatgaagaaactggaacaaaatcttctggaatgcccacagaccaggagtccctgagcagtggagatgctgtgcttcagagagacttggtcatggagccaggcacagcccagtattcctctggaggtgaactgggaggcatttcaacaacaaatgtcagtaccccagacactgcaggggaaatggaacatgggctcatgaacccagatgccactgtttggaagaatgtgcttcagggaggggaaagtacaaaggaaagatttgagaactctaatattggcacagctggagcctctgacgtgcacgtcacaagtaagcctgtggataaaatcagtgttccaaactgtgcccctgctgccagttccctggatggtaacaaacctgctgagtcttcacttgcatttagtaatgaagaaacctccactgaaaaaacagcagaaacggaaacttcacgaagtcgtgaggagagtgctgatgctccagtagatcagaattctgtggtgattccagctgctgcaaaagacaagatttcagatggattagaaccttatactctcttagcagcaggcataggtgaggcaatgtcaccctcagatttagcccttcttgggctggaagaagatgtaatgccacaccagaactcagaaacaaattcatctcatgctcaaagccaaaagggcaaatcctcacccatttgttctacaactggagacgataaactttgtgcagactctgcatgtcaacagaacacagtgacttctagtggcgatttggttgcaaaactgtgtgataacatagttagcgagtccgaaagcaccacagcaaggcaacccagctcacaagatccacccgatgcctcccactgtgaagacccacaggctcatacagtcacctctgaccctgtaagggatacccaggaacgtgcggatttttgtcctttcaaagtggtggataacaaaggccaacgaaaagatgtgaaactagataaacctttaacaaatatgcttgaggtggtttcacatccacatccagttgtccctaaaatggagaaagaactggtgccagaccaggcagtaatatcagacagtactttctctctggcaaacagtccaggcagtgaatcagtaaccaaggatgacgcactttcttttgtcccctcccagaaagaaaagggaacagcaactcctgaactacatacagctacagattatagagatggcccagatggaaattcgaatgagcctgatacgcggccactagaagacagggcagtaggcctgtccacatcctccactgctgcagagcttcagcacgggatggggaataccagtctcacaggacttggtggagagcatgagggtcccgcccctccagcaatcccagaagctctgaatatcaaggggaacactgactcttccctgcaaagtgtgggtaaggccactttggctttagattcagttttgactgaagaaggaaaacttctggtggtttcagaaagctctgcagctcaggaacaagataaggataaagcggtgacctgttcctctattaaggaaaatgctctctcttcaggaactttgcaggaagagcagagaacaccacctcctggacaagatactcaacaatttcatgaaaaatcaatctcagctgactgtgccaaggacaaagcacttcagctaagtaattcaccgggtgcatcctctgcctttcttaaggcagaaactgaacataacaaggaagtggccccacaagtctcactgctgactcaaggtggggctgcccagagcctggtgccaccaggagcaagtctggccacagagtcaaggcaggaagccttgggggcagagcacaacagctccgctctgttgccatgtctgttgccagatgggtctgatgggtccgatgctcttaactgcagtcagccttctcctctggatgttggagtgaagaacactcaatcccagggaaaaactagtgcctgtgaggtgagtggagatgtgacggtggatgttacaggggttaatgctctacaaggtatggctgagcccagaagagagaatatatcacacaacacccaagacatcctgattccaaacgtcttgttgagccaagagaagaatgccgttctaggtttgccagtggctctacaggacaaagctgtgactgacccacagggagttggaaccccagagatgatacctcttgattgggagaaagggaagctggagggagcagaccacagctgtaccatgggtgacgctgaggaagcccaaatagacgatgaagcacatcctgtcctactgcagcctgttgccaaggagctccccacagacatggagctctcagcccatgatgatggggccccagctggtgtgagggaagtcatgcgagccccgccttcaggcagggaaaggagcactccctctctaccttgcatggtctctgcccaggacgcacctctgcctaagggggcagacttgatagaggaggctgccagccgtatagtggatgctgtcatcgaacaagtcaaggccgctggagcactgcttactgagggggaggcctgtcacatgtcactgtccagccctgagttgggtcctctcactaaaggactagagagtgcttttacagaaaaagtgagtactttcccacctggggagagcctaccaatgggcagtactcctgaggaagccacggggagccttgcaggatgttttgctggaagggaggagccagagaagatcattttacctgtccaggggcctgagccagcagcagaaatgccagacgtgaaagctgaagatgaagtggattttagagcaagttcaatttctgaagaagtggctgtagggagcatagctgctacactgaagatgaagcaaggcccaatgacccaggcgataaaccgagaaaactggtgtacaatagagccatgccctgatgcagcatctcttctggcttccaagcagagcccagaatgtgagaacttcctggatgttggactgggcagagagtgtacctcaaaacaaggtgtacttaaaagagaatctgggagtgattctgacctctttcactcacccagtgatgacatggacagcatcatcttcccaaagccagaggaagagcatttggcctgtgatatcaccggatccagttcatccaccgatgacacggcttcactggaccgacattcttctcatggcagtgatgtgtctctctcccagattttaaagccaaacaggtcaagagatcggcaaagccttgatggattctacagccatgggatgggagctgagggtcgagaaagtgagagtgagcctgctgacccaggcgacgtggaggaggaggagatggacagtatcactgaagtgcctgcaaactgctctgtcctaaggagctccatgcgctctctttctcccttccggaggcacagctgggggcctgggaaaaatgcagccagcgatgcagaaatgaaccaccggagtatgagctggtgcccctctggtgtgcagtactctgctggcctgagtgctgactttaattacagaagtttcagtctagaaggcttgacaggaggagctggtgtcggaaacaagccatcctcatctctagaagtaagctctgcaaatgccgaagagctcagacacccattcagtggtgaggaacgggttgactctttggtgtcactttcagaagaggatctggagtcagaccagagagaacataggatgtttgatcagcagatatgtcacagatctaagcagcagggatttaattactgtacatcagccatttcctctccattgacaaaatccatctcattaatgacaatcagccatcctggattggacaattcacggcccttccacagtaccttccacaataccagtgctaatctgactgagagtataacagaagagaactataatttcctgccacatagcccctccaagaaagattctgaatggaagagtggaacaaaagtcagtcgtacattcagctacatcaagaataaaatgtctagcagcaagaagagcaaagaaaaggaaaaagaaaaagataagattaaggagaaggagaaagattctaaagacaaggagaaagataagaagactgtcaacgggcacactttcagttccattcctgttgtgggtcccatcagctgtagccagtgtatgaagcccttcaccaacaaagatgcctatacttgtgcaaattgcagtgcttttgtccacaaaggctgccgagaaagtctagcctcctgtgcaaaggtcaaaatgaagcagcccaaagggagccttcaggcacatgacacatcatcactgcccacggtcattatgagaaacaagccctcacagcccaaggagcgtcctcggtccgcagtcctcctggtggatgaaaccgctaccaccccaatatttgccaatagacgatcccagcagagtgtctcgctctccaaaagtgtctccatacagaacattactggagttggcaatgatgagaacatgtcaaacacctggaaattcctgtctcattcaacagactcactaaataaaatcagcaaggtcaatgagtcaacagaatcacttactgatgagggagtaggtacagacatgaatgaaggacaactactgggagactttgagattgagtccaaacagctggaagcagagtcttggagtcggataatagacagcaagtttctaaaacagcaaaagaaagatgtggtcaaacggcaagaagtaatatatgagttgatgcagacagagtttcatcatgtccgcactctcaagatcatgagtggtgtgtacagccaggggatgatggcggatctgctttttgagcagcagatggtagaaaagctgttcccctgtttggatgagctgatcagtatccatagccaattcttccagaggattctggagcggaagaaggagtctctggtggataaaagtgaaaagaactttctcatcaagaggataggggatgtgcttgtaaatcagttttcaggtgagaatgcagaacgtttaaagaagacatatggcaagttttgtgggcaacataaccagtctgtaaactacttcaaagacctttatgccaaggataagcgttttcaagcctttgtaaagaagaagatgagcagttcagttgttagaaggcttggaattccagagtgcatattgcttgtaactcagcggattaccaagtacccagttttattccaaagaatattgcagtgtaccaaagacaatgaagtggagcaggaagatctagcacagtccttgagcctggtgaaggatgtgattggagctgtagacagcaaagtggcaagttatgaaaagaaagtgcgtctcaatgagatttatacaaagacagatagcaagtcaatcatgaggatgaagagtggtcagatgtttgccaaggaagatttgaaacggaagaagcttgtacgtgatgggagtgtgtttctgaagaatgcagcaggaaggttgaaagaggttcaagcagttcttctcactgacattttagttttccttcaagaaaaagaccagaagtacatctttgcatcattggaccagaagtcaacagtgatctctttaaagaagctgattgtgagagaagtggcacatgaggagaaaggtttattcctgatcagcatggggatgacagatccagagatggtagaagtccatgccagctccaaagaggaacgaaacagctggattcagatcattcaggacacaatcaacaccctgaacagagatgaagatgaaggaattcctagtgagaatgaggaagaaaagaaaatgttggacaccagagcccgagaattaaaagaacaacttcaccagaaggaccaaaaaatcctactcttgttggaagagaaggagatgattttccgggacatggctgagtgcagcacccctctcccagaggattgctccccaacacatagccctagagttctcttccgctccaacacagaagaggctctcaaaggaggacctttaatgaaaagtgcaataaatgaggtggagatccttcagggtttggtgagtggaaatctgggaggcacacttgggccgactgtcagcagccccattgagcaagatgtggtcggtcccgtttccctgccccggagagcagagacctttggaggatttgacagccatcagatgaatgcttcaaaaggaggcgagaaggaagagggagatgatggccaagatcttaggagaacggaatcagatagtggcctaaaaaagggtggaaatgctaacctggtatttatgcttaaaagaaacagtgagcaggttgtccagagcgttgttcatctctacgagctcctcagcgctctgcagggtgtggtgctgcagcaggacagctacattgaggaccagaaactggtgctgagcgagagggcgctcactcgcagcttgtcccgcccgagctccctcattgagcaggagaagcagcgcagcctggagaagcagcgccaggacctggccaacctgcagaagcagcaggcccagtacctcgaggagaagcgcaggcgcgagcgtgagtgggaagctcgtgagagggagctgcgggagcgggaggccctcctggcccagcgcgaggaggaggtgcagcaggggcagcaggacctggaaaaggagcgggaggagctccagcagaagaagggcacataccagtatgacctggagcgactgcgtgctgcccagaaacagcttgagagggaacaggagcagctgcgccgggaggcagagcggctcagccagcggcagacagaacgggacctgtgtcaggtttcccatccacataccaagctgatgaggatcccatcgttcttccccagtcctgaggagcccccctcgccatctgcaccttccatagccaaatcagggtcattggactcagaactttcagtgtccccaaaaaggaacagcatctctcggacacacaaagataaggggccttttcacatactgagttcaaccagccagacaaacaaaggaccagaagggcagagccaggcccctgcgtccacctctgcctctacccgcctgtttgggttaacaaagccaaaggaaaagaaggagaaaaaaaagaagaacaaaaccagccgctctcagcccggtgatggtcccgcgtcagaagtatcagcagagggtgaagagatcttctgctgaccctcttcctctctgctgaggcagctgcctcctgatcctggccagcccacctctcctgctgtccccgcgtgcacaagtctcttacactggacgcccactgctcctcagcgtccagtcctcctgggcggccccaggtcctggacaataagcaacagatgatattgagtgtcgggtggggaaggaggcccagactctgcttcggccatgatttgtgactgcccaggactctcaggttgggctggccctactcaggattacactgaaagtaatggcctcgtaagtacaggtgatggttttggacacgtcaggaattcctaaaggctgaaagagtgtatccaagtaaggtctgaacctccgaatgccttttatttgggggaacacaaaaccaaacagcagatgttttggacttgatctgtgtacgtacatggggacctgtctgcatatacacacggggaatgccagaagaaggcccagtctgcaccaggcgtctggtcaacttagcacaagggcagtgcctggacggacccggagcccccgcatatcagcagttcacccagtactcctcagagactggtttccctctaaacccatcccgggcacataccacccgtgttttgcatgtatttctcatttcattttagggatgacaaacatttgtgaaaccagtgagagaaggcttgatgtgtataaaagacgtgatgtgcaccacctcgatctcggtgtttcaggcactaaagcaacaaaacaacccatagtatctcattctgtcatcagatccagaagaaatatcctggttttccagcatgtttacccacatgttttggccatggataaagtgaagaggcctactcaccattatccctgcagcgtgacaccttttgattgtcactgaccactcagaaggggccacggcctcctggctgtgttcctgagcccccgtcgtgcctctcccagacagcagctgtctggcccttgctgggtgagggcacaccactgccaggggtcagcctcgcacccaggccaggcagaagctgtgctctgaagctaggacagctggctgagaagtgggttcaggcgaagggtgaagccatgtgtagcagttcctgccagtgcagatctggagaggagctggcccggaaggcgtggttgtgaaagcgcccttcttatgttaggaggccttggcaaaattggatttcttcaaaaatacatgtaaaggtctgttgttgaattgtactctgcccctggaagcagatacagatggctgcctgctgctcggctttgcttttgcttttcccaccgtgttttcatctttgttcacttgaggctttccccagctggtgtgtgcaggacagttcatggtaatgttgccctctgaggccccgtacaccagaagggaggccctggaaaattttgtgcttccaacgtggccttcaattcttgcttttttgcccctcggaagcatggggcttttgagcacacttaaaaaaagaaaaatctgtaacttggtgcttattgatgaattgcaagctggccttgcagatggagatatttatctttcagtttatttgaaagaggtctggtttaaaatttgtagcctacatttgttttatttattgtatttgtgtgtttgtgtttgtttttttttaagggtgagccaggtctagcccaacagtctaaactatccagtcaataccgagtgaagtggcagccagcactgttcactctgtgtcttttgaagtgccttgaaggcccagatgaaattttaaagggagggggtccatgtccttccctcccccaccccgcctcattctttaatcaaaggatgtcttctcccttgtttgagaatgaagaaactcgccacctctgacctacctttgcctttttctgtcatggagaatactcacccttcagaaacagaccaaaggccaaaacctgctgatttttctattgaaaatatgtccccttgcaaagaccctaaacaaaaagttaagtttctttctttcacctatttgtacaactccaagttacagctgaatctgtcgtgactttcctgagatctacccggggcttggctgtctgttctgggcactggctccgagttcccctcctgggatttgcaggagggcagtactgaacctgcattcttctccttgtaaatgtaggccgggtgcccctgttctccgggtttggaacaatacgaggttggtgctgatgggatttacttgcgtacgtgctcttcacaaaaacaccgtggatgctgaagttagagcacgtcgccacagagcttgacatcaatgttagagggtctcttactccccgcccagctgtgatgtttcatctgctttggttgttttggtggtcttttttaaaaatagagatttcacatctgcccagaccccactcaaaacgatttggtcaggttctggttggacaagtttaaaatcaaagtagtgcccggaattccctcaaaccacccaacttcatccaggaatacagtctgcagtgcagcaacagaaccgcttaccaagaactgtgcttacatacctttgtcatctctcttccccccttggaagttgtcctcagggggatttgttcctgtcctggggatttacctgggatggtggctgcctgtgcttttgctcatggccttgacagtgctctagttgctggatctaatggcctgtcttggtttctatcacatgagaaggggttgtttttttggggtgactcggactgaattccccatactgtttccacgccgggacaccatgttctccatcaagctaaagaaatcacgtgcctgaaactgtgcttaagttttgggggaaagatggagttcctatccagagcccccagatttccagaatcgagtgagcttcctggaaggagactgcgtcttctctcaattccagtcatctcagtcgttgtcgttaggtgacatgtgcactttaaatgctctcatcggttggcttcattttcaagacaatcaaatgtattgactgtgttttcttcttagaaaatggagagggttaaaaacatgcaaactgccactttcaacctttgccagtattccctctacccccgtgagagctatctggggggaagaatccttaccaaggtttttttggaaaggtacgaatcttaacttttttccccttctgtgtctcagggtaatactattcagagtcgcccctttgctcattttctcccgtatttgttaccttcctgaggcctcagtattagtcgtgagcacaaagttttgagacctttggcgttgtttcttgatgtgggaggggaggtgttagtgcatgcaagggttgaactagatagaccctgccttagtagagggtgggactataaccttagaggccagaacttgatccagaagttgctgtccacagaagtgctttctatttcatcatttttgtttctagggctctttttctgtagccaggtcttcccaaggattttagtatttgcattggagttgaggtttactctaatgatggtggcccagctgtgcccagaggacagccaggcaggccctgggagggagtttagaaagacagtcctggtgaatgggcttcaagtggtcacaaagagggtggctgtgaggtgaccccagacactgcagaacgatgtgcaccctctgcgttttggatgtccttggaatgtgggagcctagaaataaccctgtggatggaattggggcagcggctgctggagatctgtgtgccttgccttccttcagcaggaccgtctaggtgcgcagccacctatggatgcgtcccagccagccccgtcgctctcgtccatcctcagagacaaagaagagggcagggagtttgggcttggttttgaactttcctttcaatgtagcaaagcattcctagttaaccagagccttggaatctactgcctgctggccaggctttaaaatgaaaagtgttttaatgctgccataaaagggaggcgggggggaggaagggaaaataaaggcatctttccaagtactcatctaatttaattgtcaaaagattgataggccatgaattacttctccatctcactaagggttaaaggcgtgcaaccccccactggctgtgtcccctgccaccgaagtgagtgacctgccctacaaccaggtgggaccacctgtgctgcagtccggaggggcttctgcaggaagcactcaccccccacaccttccccggcctgagcttcccctacctttcgtcaccacctgagggcatgagcacaggccatggggcgtgcctggtgagtctgcctgtggttcaggcttagcctgtggtctcctgtgtgctgctgcccgcatgggatgcgcaggggaggcgtggggatccgcaggagggtggttgggatacaccggatacctctgctctcattgcttgtttgcaaatgctctatggacatttgtgtgctaaatcctattaaataaaaaagacgggttaaaacccagatgctgtatattcatttgtaattatgtataaagtgaagcagttttaaactgtaaagatttttttcagtgtgttttctcgaattttgccacaacatactggcttcgtattttatttatctttctttctagttaccagcttcagacccttgtaaagtctccctcagccctttcaaaaaataataaatttcctgtgaagtt

SEQ ID NO: 380 - DNA, 5217 bp, Homo sapiens
agcgcgcggagggcggggcctccccgggctcggccgcgccgccgcctcctccgcctcctcctcctcaccagcgctaaagccgggactggaccgagcggagttgtgcgtgtcgccgaaggggggtgggccgggggaggggaggttcgttccgcggagccgcagccagaaccgggaccaagaatcgccttcagccctgtctggtgcatccttggcagaaagtgaggaggaaaacacccccattgttagatgaggtcttaatcatggaacatttgaagtcacgtaaagaaggttctttggcatggacacaagttcagtgggaggattagaattgactgatcagactcctgttttattagggagtacggccatggcaactagtctcacgaatgtaggaaactcatttagtggtccagctaatcctttagtgtctagatctaataagtttcagaactcgtcagtggaagatgatgatgatgttgtttttatcgaacctgtacaacctcccccaccttctgtaccagtggtagctgatcaaagaaccataacatttacatcatcaaaaaatgaagaactacaaggaaatgattccaaaattactccttcctcaaaagagttggcatctcagaagggaagtgtaagtgagacaattgtcattgatgatgaagaggacatggaaacaaatcaagggcaagagaaaaattcctccaattttattgaacgaagacctcctgagactaaaaacagaaccaatgatgtggatttctccacttccagtttttcaagaagtaaggtaaatgcaggaatgggtaatagtggtatcaccacagaaccagactctgaaattcagattgctaatgttacaactttagaaacaggtgtaagctctgtgaatgatggccaattagaaaatactgacgggcgagatatgaacttaatgattacacatgtaacatcactgcagaataccaacttgggagatgtctctaacggactgcagtcaagtaattttggtgttaatatacaaacatacaccccatctttaacttcacagaccaagactggagtaggaccttttaatcctggtagaatgaatgtggcaggagacgtttttcagaatggagaatctgcaactcatcataatcctgattcttggatctcccagtcagcttcatttccccgtaatcagaaacaaccaggggtggactctttatcaccagtggcctcacttcctaaacagattttccagccgtctgtccaacagcagcctactaaaccagttaaagtcacttgtgcaaactgcaaaaaacctttacagaagggccagacagcttatcaacgaaaaggatcagctcacctcttttgttctaccacctgcctttcttccttctcccacaagcctgctccaaagaaactctgtgttatgtgtaaaaaagatataactacaatgaaaggaaccattgttgctcaagtggattcaagtgagtccttccaggaattctgtagtacatcttgtttatctctctatgaagacaaacagaatcctactaaaggagctctaaataaatcaagatgtacaatctgtggtaaactaactgagattcgccatgaagtcagctttaaaaatatgactcataagctgtgcagtgaccactgctttaatagatatagaatggccaatggtttaataatgaattgctgtgaacagtgtggagagtacttgcccagtaaaggtgctggaaataatgttctggtgattgatggtcaacagaaaagattttgctgtcaaagttgtgtcagtgaatacaaacaggtaggtagccatccaagcttcctgaaggaggttcgagatcacatgcaggactctttcttaatgcagcctgagaaatatggaaaactgacaacttgtactggttgccgaacacagtgcaggttttttgatatgactcagtgtataggtcctaatggatatatggagccatattgttcaactgcttgtatgaacagtcacaagacaaaatatgcaaaatcacaaagtttgggaattatttgccatttttgtaagcgaaactctttacctcaataccaagccacaatgcctgatggaaaactgtacaacttttgcaattccagttgtgtggctaaatttcaggctctaagtatgcagtcatctccaaatggccagtttgtagcgccaagtgatattcagttgaaatgcaactactgcaaaaattccttttgttcaaaaccagaaatcctggaatgggagaacaaagtgcatcagttctgcagcaaaacttgttcagatgactataagaagttgcattgcatagttacatattgcgaatactgtcaagaggagaagactcttcatgaaacagtaaatttctctggcgttaagagacctttctgtagtgaaggctgcaaattattatacaaacaggattttgccagacgtttaggattgagatgtgttacttgcaactattgttctcagctatgtaagaagggagcaactaaagaactcgatggtgttgtgagagatttctgcagtgaagattgctgtaaaaaatttcaggattggtactacaaggctgcaaggtgtgactgttgtaaatctcaaggaactcttaaagagcgagttcagtggcgtggggaaatgaaacatttctgtgatcaacattgcttactgcgtttctactgtcaacaaaatgagcccaacatgacaactcagaaaggacctgaaaacttacattatgatcagggttgtcagacatctcgaaccaaaatgacaggttcagcaccacccccttctccaacacctaacaaagagatgaagaacaaagcagttctttgcaaacctttaacaatgacaaaagctacttactgtaaacctcacatgcagaccaaatcttgtcagacagatgatacttggaggacagaatatgttccagtgcctatccctgtgcctgtgtatatcccagttcctatgcacatgtacagtcagaatattcctgttcctactacagttcctgttcctgtgccagttcctgtttttctgcctgctccattggacagcagtgagaagattcctgcagcaattgaggagctaaaaagcaaggtttcttcagatgctcttgatacagagttgcttacaatgacggatatgatgagtgaagacgaggggaaaacagagacaaccaacatcaacagtgtaattattgaaacagatataattggttcagaccttttgaagaactctgacccagagacacagtccagcatgcctgatgtaccatatgaaccagatttggatatcgaaatagattttcccagagctgctgaggagcttgatatggaaaatgaatttttattaccacctgtttttggcgaagaatatgaggaacagcccagacctcgatctaaaaaaaagggagccaagagaaaggctgtatcaggataccagtctcatgatgatagttctgacaattcagaatgcagctttcctttcaaatatacgtatggcgtaaatgcatggaaacactgggtcaaaactaggcaacttgatgaagatcttctggtattagatgagttaaaatcttctaaatcagtaaagttaaaagaggatctactctctcacaccacagctgagcttaactatgggttagctcattttgtcaatgagatccgacggccaaatggagagaattatgcacctgacagcatctattacctttgccttggaatacaggagtatttgtgtggaagtaatcgaaaagacaacatatttattgatcctggataccaaacatttgagcaagaattgaataaaatactgcgaagctggcaaccaagcatacttccagatgggtcaatattctctcgagttgaagaagactatctctggaggataaaacaactaggatcacactctccagtagctcttctgaatacactgttctactttaacactaagtattttggcctgaaaacagtggaacaacacttaagactttcctttggcactgtgtttaggcattggaaaaaaaatcctttaacgatggaaaacaaagcgtgtcttcgataccaagtgtcttccttgtgtggaacagataatgaagataaaattactactggaaaaagaaaacatgaagatgatgagccagtatttgaacaaattgaaaacacagccaatccttccagatgtcctgtgaaaatgtttgaatgctacttgtctaaaagtccacagaatcttaatcagaggatggatgttttttatttgcaaccagaatgctctagttctacagatagccctgtctggtatacgtctacttcactggaccgaaacaccttggaaaatatgcttgtacgggttcttctagtaaaagatatttatgataaagacaattatgaactggatgaagacacagactaaaaaggaacgttgcagaagcaatcgggataaaacagcattagatagtcatgctgctagatctttattatggaaaacatttcaagtttactccttctgttttgagttttgtagcagtgtacccacgctgggtattaccatgtaaataatctgtgagtgaaagttgccattattctatgtagtggttttaggatacttaacaaatacattcaaattctttttttattattatttatttgattaggtatgtttgtaactttttacattacagaatatgaatgagaatgtgccatgtataatttttttcttgtagtaagaaacatccatattgcacaactctactgttgcaaagcttccttggaagggggctcttttactgggttcttaaccagatggttgtgtatgggtagcactactaaaagtttagaacttgcagtgtctttcggaatttttaaaataaactgtaaactaataggctggggtttttgttttgttttggggttttgttttgtttggttttacattttagttactgaagccttacaaggttatgtagagagataccatcttctgtaccaaaaatagacaagagaatgctgtcaatattggtgtactgtaatgtgaatctatgctggtgaaaacaattttttgttccccttattaaaaccttagtgtccttttctcatttgtggctttctgcatcacccaatcaataaaaaacaaatatatatatgtatatatatgtatgtatgtgtgtgtgtatatatatatatatatatatatatata

SEQ ID NO: 381 - DNA, 2728 bp, Homo sapiens
ggggtagggaggccgactgagcaggagtcgtccgcttatagtggaggctgctaggagccggtcagagggtgagtggggagcaggcgagcgagccacagcaggcaggagggagcgtcgcgcggcgcagaggagcgccggggcagggccgcggcggaaccacagccggagaggggcagcccgagccgggcgccgcagggtccccacccccacccggccggacagtgcccggtgttcccccgtgcggggggcggcggcggcggctgacgggaccgccgggaccgcgggggtgttgccacctccaccgaggagccggcgcggccgcgggctcctcagagccggggccccgggcccgtgacagacgggccgaggaagggagagaggcggcggcgacaccatgtcatctcccagtccgggcaagaggcggatggacacggacgtggtcaagctcatcgagagtaaacatgaggttacgatcctgggaggacttaatgaatttgtagtgaagttttatggaccacaaggaacaccatatgaaggcggagtatggaaagttagagtggacctacctgataaataccctttcaaatctccatctataggattcatgaataaaattttccatcccaacattgatgaagcgtcaggaactgtgtgtctagatgtaattaatcaaacttggacagctctctatgatcttaccaatatatttgagtccttcctgcctcagttattggcctatcctaaccccatagatcctctcaatggtgacgctgcagccatgtacctccaccgaccagaagaatacaagcagaaaattaaagagtacatccagaaatacgccacggaggaggcgctgaaagaacaggaagagggtaccggggacagctcatcggagagctctatgtctgacttttccgaagatgaggcccaggatatggagttgtagtagaaaaagcacctgcttttcagaaagactattatttcctaaccatgagaagcagactataatattcatatttaaacaaagcaattttttttattactaaacaaggtttttatgaataatagcattgatatatatatattatatatcaccctttagatcttgatttcttggtcatttctcaacctgaggtgcatagcatattcccacattccatttggtagcaatatgcggtctgaatgcatgcattcatgagtccatgtggccaagtcagcctgtgtgctactgaactgtcgaaggaaatagccgctctgataggtagatgtgagtaaaaagaacaggaaaaaattgcttcttttattggtttccaaagaaacaaaccaaaccaaccagctcttggatgtgaagataaaatagtgcttttttgaaatggagaggaaaaacttggggaggaagaggcctgctgtgggggcatcggagccagccatgtaagaatcagagctgctccttcctgtgaatcctaggtggccctatgtcttctgtggagttacagtataaagcagggagctaattaagagtattaaaacttaaaaccattttttgactctgattttaagtacatttttatatgtcagttgctgcccttcacactaccaggccctgcagccacagtgttctgttggagaaacttggggaagtgttttctgaaccagttctttttcttggggtagagcgtgaaatccagacctgtttttgaaaggacagcacaggaggagaaaagtgactgggacgatgcttcctctcatccaaaacacatgcagagtcacatcctcatcctagtgtttggcagtttgagaccgctaccctgaacttaagagctttaaatatgagggttgtgtttctgggggggttatttttttggtgtgtgtgtgtgtgtattgtgcttagaaaggttgcagatttcatcttcacctaccaagaggcggccgcctccttggacaagccgctcatggaccattagacttgagaagacgacccacgtggtgactgcaaagccctgggtacttgccttcatgttctggtttggttttccctttttctgctgctcttggcagcagcctggtcatcatctgcttgtgggagtgggaaatgggtattttagacccaacacaggttctaaatttaaaacaaataataattggaacaaataaaggttcttgtacccagagtgattctacatgggaaaaacaaaccagcttttttcagagagtgaccgaataggaagaagggattcagaaatatgatgtagtagaacatgccctgcaggaagaaaatgttttctctcctgcgtatgttaagaggaaatcagtttaaaatgcctgctaatcaaatgtcgactcagctaaccatatgtccaggttgctgcagagtttctttcaaatctgagtgttgcctgctgaactcggaggggagtttggagaaattttagacagcagctctgtgttctttttttgccgcagccaataagataatagcagaattagccaatcctaaaaccttctaaagacgatttttgagcatcccactgggattatttaatttttctttttgacgtgtgtttttagtttagaagtgctgtattccacaaggtttaagtcagtgaggttggaagataccctatcttttttattcaaaaagcacaatcaatcttttgtttgaaaatctatataaagtacaacttgcttttagcatgattattttcctaaataaaaagacaaagaattt

SEQ ID NO: 382 - DNA, 5160 bp, Homo sapiens
gttccaggtgcaagcgccgggtttgctgcccgctgggcgcccctgcagcggcccgagctgtggccggcgtggatgaggggcaggcgaggcagggccgcccctccagtattgccgcccctcccgccccagggcagggctgggagggtacagcccgggggcgggctcgggtcgcctcccggccgccgcgtcctcgctgccccgggccgggcgggcgggcgccgagagcctcccagcccgccccgtgccccgcccgcccggctgcttccgcggcggcgctgcccgcacatgggctaggctgccaggatgttcagcttcgaaggcgacttcaagacgcggcccaaggtgtcccttggcggcgcgagcaggaaggaggaaaaggcttctcttttacatcgtactcaggaagaaagaagaaagagagaggaagaaaggcgaaggttgaaaaatgcaataattatccagtcatttattcgaggctatagagacagaaaacagcaatattccatccaaagaagtgcatttgatcgctgtgctaccttgtcacagtccgggggcgcttttcccattgctaatggccccaaccttacccttttggtaaggcagcttctgtttttttacaaacaaaatgaagactcaaaacgtttgatatggctgtatcagaacttaattaaacacagctctctgtttgtcaagcagttggatggatctgagagacttacatgcttatttcagataaaaagattgatgagcctctgttgcaggttgctgcaaaactgtaatgatgacagtttgaatgttgcacttccaatgagaatgcttgaagtattttcgtctgagaatacttacttgcctgttttacaagatgctagctatgtggtgtcagtgattgaacaaattttgcactacatgattcacaatgggtattataggtctctatatttgttgattaacagcaagcttccatcaagtattgaatattctgatttatctcgagttcctatagcaaaaattttgctagagaatgttctaaaaccattgcactttacttacaactcctgtccggaaggtgcgaggcaacaagtttttacagccttcacagaggagtttctggcagcaccttttacagatcagatttttcatttcatcattccggcgcttgcagatgcgcagaccgttttcccttacgagccctttctgaatgcactgttgttaatagagagtagatgttcaagaaagagtggtggagcaccctggcttttctatttcgttttaactgttggcgaaaattatttgggggccctctctgaggaagggctgctggtgtatttgcgggtgctgcagaccttcctctctcagttaccagtctctcctgccagcgcgagctgtcacgactcagccagtgactctgaggaggagagtgaagaagccgacaagccctcaagcccggaggatggcagactgtcagtatcatacataacagaggaatgcctgaagaagctggacacaaagcagcagaccaacaccctgctcaacctggtgtggagggactctgcgagcgaggaggtcttcaccaccatggcctccgtctgccacacgctgatggtgcagcaccgcatgatggtacccaaagtcaggcttctctacagtttagcctttaatgccaggtttctgagacatctttggtttctaatatcttccatgtcaacacggatgatcacagggtctatggtaccgttgcttcaggtgatatccaggggttctcctatgtcttttgaagattctagtcgaatcatcccactcttttacctttttagctccttgtttagtcattcactaatttccatacatgataacgaattcttcggtgatcccatagaagttgtaggtcaaagacaatcatcaatgatgccttttactttagaagagctgataatgttgtctcgatgccttcgagatgcatgcctggggatcatcaagttggcttatccagaaaccaagccagaagttcgagaagaatatattacagcatttcagagtattggagttactactagctctgaaatgcaacaatgcatacagatggaacagaaaagatggattcagttatttaaggttatcaccaatctagtgaaaatgttgaagtccagagacacgaggagaaatttttgtcctccaaaccactggctgtcagaacaagaagatattaaagcagataaggtcactcagctctatgtgccagcatccagacatgtgtggaggttccggcggatggggaggataggcccgctgcagtccaccctggacgtgggtttggagtccccgccgctgtctgtgtctgaggaaagacagcttgctgtcctgacagagttgccttttgtggttccatttgaggaacgagtaaagatctttcagaggttgatttatgcagataagcaagaagttcaaggagatggtccatttctggatggaattaatgtcacaataagaagaaattacatttatgaagatgcttatgacaaactttctccagaaaatgagcctgatttgaaaaagcggatccgtgtgcacttgctcaatgcccatggcctggatgaagctggcattgatggtggtggtattttcagagagtttttaaatgaactactgaagtcaggatttaaccccaaccaggggttctttaagactactaatgaagggcttctgtaccccaacccggctgctcagatgcttgtgggagattcttttgccagacattactacttcctagccagaatgcttggaaaggctctctatgagaacatgctggtggagctgccctttgcaggcttctttctttccaagttgcttggaaccagtgccgacgtggacattcaccacctcgcctccctagaccctgaggtgtataagaatttgctctttctgaagagctacgaagacgatgtggaggagcttgggctgaacttcactgtggtgaacaatgacctgggagaggcgcaggtagttgaactaaaattcggtgggaaagacatccctgtcaccagcgccaaccggattgcgtacatccacttggtggcagactacaggctgaacaggcagatccgccagcactgcctggctttccgccagggccttgccaatgtcgtcagcctcgagtggctccgaatgtttgatcagcaagaaattcaggtattaatttctggtgcacaagttcccataagcctagaggacctaaaatcctttacaaactattcaggaggctattctgcagaccatcctgttattaaggtcttctggagagttgtggaagggttcactgatgaagaaaagcgcaaactgctgaagtttgtaacaagctgctctcgaccccctctcttggggtttaaggagttgtatcccgcattttgtattcacaacggaggctccgaccttgagcggctccccacagccagcacctgcatgaacctgctgaagctccccgagttctatgacgagacacttttgcgaagtaaacttctctatgcgattgaatgtgccgctggctttgagctgagctgaagctgatgctggggtcagacccctacagagaaccagtgcttccttcgtcagcagcgcctccccagacccacgaggatactcacactgcacgcctgaggctctcctaagctccttctttcattctgccattcctccctcccttccttttttaaatgatttttattacggtgtggtcacttatttagatggacattgcttttcaaataacttaaaataacacgttatgtgccatgtggctactttagtaatattgccaagaagagcacagtttttacactagtggcatctcagtgaaattaaccaaagatgaagctttggctttgctggtgagatcagagccctcctgagcaggcagcgccactccagggttcagacagggctgcacaggcggcagagatacagggtctgagggctgagacgccatggggccgctgctgcttatgtggttggattgtttacaagcctcattattaaaactgaaggcattttttttttctgctgcctttcccaaagtggttaggtttggaaaagagatgatgatggtaatattttatttgtgctttttaagccatttccccaaatgggactagcatgcttgttttcagtataccgtggcctgcctcatgatggtttggagatactgtctgtggatgtgaggtggggacttcattcattgtcctatttctatctccactttgtgcctggagagctttcaggggaggtggaggaggagggtctgccaagctactgcaacatctgtcacccactatacccagttacttgggggaggacagacactgtggtgtcattaaagttgtttgaaccaaagtggcggctgcatctttgtcccgatgctagccgtgccggtctcccatcatccgctcgccctcctttcccctgggctgcgcccacttgtcttcctggatatttgggggtgactcgccatgcttggcaccctctgcttcctggtgctgctctgactcgaagacgggacagtccctggtgcacatccagggaagaggagtgtcggtagttcttgcagtaggcactttatcaggacctgacctgttgctgggtgattttagtctctacaaacagaaagcgtttcaaagcgtcagctgtgggagcagagtgaccctttgctgatgctggggggaggggatctaaatcctcatttatctcttctatgtctagtattttactgtcactggaggctctgtgggctgtcatagttaattgaccataattagcaatatacttttaaagtgggaaagctgaatgacacttttaagacaatgaacattatcaaaacaaaatgtataatttcttaatttgaataataagcgtttaaatgctatttgtagtcttgatatacagaaataaaataattagggttggtcttttttattttaggttttatgttgaatgttctatatcttattagttaatttgtatattttattagtattttggaaatagcatatctgagactgaggagaaattgacaattcacttatttgtggtttttttctcagctattctgagcttatttatttatttgtatgttctaatggctaaacatttacattaaatattttttttccc

SEQ ID NO: 383 - DNA, 5787 bp, Homo sapiens
gtggttctgcgcttgtcatcatggcgacgcggggccatgtgcaggaccctaacgacaggcgcctccggcccatttacgattatcttgacaatggtaataataaaatggcaattcagcaagcagataaactgttgaagaaacataaggatcttcattgtgctaaggttttaaaggcaattggtttacagagaactggaaagcaagaggaagcctttactcttgcacaggaggtggcagcccttgaacccacagatgacaactcactgcaggcactgactatcctttaccgggagatgcaccgaccggagttagttacaaaactttatgaggcagctgtgaagaaagttcccaatagtgaggagtatcactctcacctcttcatggcctatgccagagtgggtgaatacaagaaaatgcaacaggctggcatggctctatataagattgtccccaaaaatccctactacttttggtctgtgatgagcttaattatgcaatctatatcggcacaggatgaaaacctctcaaaaacaatgtttctgccccttgctgagagaatggtcgaaaaaatggtgaaagaggacaagatagaagctgaggctgaagttgaactttattatatgatcctggaacgtttgggaaagtaccaggaggccttggatgtcatcagagggaaattaggagagaagttgacaagtgagattcagagtcgggaaaataaatgcatggctatgtacaagaagctgagcaggtggccagagtgcaatgccctttcccggcgcctcttactaaaaaactcagatgactggcagttctatctgacttatttcgattctgtctttcgactgattgaagaggcctggagtcctcctgctgaaggtgaacactctttagaaggagaagtacattattctgcagaaaaagctgtgaagtttatagaagatcggataacggaagaatctaaaagttctcgccatctccgaggaccacatctagctaaattggagctgattaggcgtttacgaagtcaaggttgtaacgatgagtacaaactgggtgatccagaagaattaatgttccagtattttaaaaagtttggcgataaaccttgttgttttacagaccttaaggtgtttgttgacctcttacctgctacacagtgtacaaaatttattaatcagttacttggagttgttcctttgtcgacaccaacagaggataagctggcactgcctgctgacatcagagctctgcagcaacatttgtgtgtggtgcagctgacgaggttacttggcttgtaccacaccatggataaaaatcagaaattgagtgtggtcagagaattgatgttaaggtaccagcatggactggaatttgggaaaacctgtttgaaaacagaattgcaattttctgactattactgtctccttgctgtccatgcgcttattgatgtatggagggaaacaggtgatgagaccactgtgtggcaggccctgactttgctggaagagggattaacccatagcccttccaatgctcagttcaaattgctgcttgttcgaatctactgtatgctgggtgcatttgaaccagtggtggatctttactccagcctcgatgctaagcatatccagcatgataccattggttatcttttgacccgatatgctgaatctctaggtcagtatgctgctgcgtcccaatcctgtaacttcgcactcaggttttttcactccaaccagaaagatacctcagaatatattattcaagcttacaaatatggtgcatttgagaagatcccagagtttatcgcttttaggaacaggctgaataattctcttcattttgcacaagtccgtactgaacggatgctgttagaccttctacttgaagcaaatatatcaaccagtttagcagaaagtataaagtcaatgaaccttaggccagaagaagatgacattccatgggaagatttgcgagacaacagagacttaaatgtttttttcagctgggatccaaaagacagggacgtttctgaagaacataagaaactttccttagaggaggagaccttgtggttaagaatccgatccttaacattgaggctgataagtggacttccaagtctcaaccaccctgtggagccaaagaactcggagaagactgccgagaatggggtatcctcccggattgatattcttcgtttgctccttcaacagctggaggcaaccctggagacaggaaagcgatttattgagaaggatattcagtatcctttccttggtcctgtacctaccagaatgggtggattctttaattctggctgttctcagtgccagataagctctttttatcttgtcaatgatatttatgagctggataccagtggtttagaggatacaatggagattcaggaacgaatagaaaatagttttaagtctttactagaccagttaaaagatgtcttcagtaaatgtaaaggtgacctcttagaagttaaagatggtaacttgaaaacacatcctactcttttagaaaatctagttttctttgttgagactatttctgttatcctttgggtatccagttactgtgagagtgtcctacgaccatacaaactaaatttacagaaaaagaaaaagaagaaaaaagaaaccagcatcatcatgccacctgtctttaccagtttccaagactatgttactgggcttcagactttaatttccaatgttgtggatcatattaaagggcttgaaacacatctaattgcacttaaacttgaagaacttattttagaagacacttctctctcaccggaagagagaaaattttcaaagactgtgcaagggaaggtgcagagcagttatctgcactcacttctggaaatgggggagctgctgaaaaaaagacttgagaccacaaagaaactaaaaatttaaggaagtatctatcatgggcactgatgactctgcaacagaatatgacaccatcttcccaggcaaaagcaacatctggttgaccatgattttaatccagaacttcctcataaaatgcatgaaggactttgatcgtgaatttttttaggtgttaaatatatacaactgattaaattattgtatataaaccagaagcgggaccctcatctgggtttgaccactttttatacatgttcatatgcatatggcagcaacaagagaaccctacttttcttcttcccatcaccagaaacatcttttcaggggagcggggggtctataaaaacagcaatagaaattaagcataaagcatcaacctcatagcaactgaatagcccttccattataaataacattgagagtttttggtctggtccttgagccacaagaagtggaggggagaccatgcctgggaacagacccccttttcacagcagtaagtttgttttgaggctttctcagctacttggctcccacagaacccaaggcaggtacacaaaggaccttagatgagatctggcatatgcacccgcaatagaagggcaccacttggatgaccacaggcacttagtttttggctagtttttgtctgatagttaagacatccccatcctagcttctgtgagagttaaaaatctcaggtaagaaggcaaggaaggctctgttaatttatagctgtttagaggggaaagcagtgcagaccacttattaagcccgctgaggactagctttctgtctttcatacatttgggaaagataggaatgactgtttcaaagaagagaggtgcacataatttatgcaggcaagtatgatacttatttcattggttttgtgagtcatatatatacatatatatatatacacatatatatatgacttgaaaattaagatttaatactttaatgttttaagtgtggggggtttgggaaggaaggaatgtaatattatggatttagccttaggctttaagttttaggctggcaaaagaaatgttattcagtgggtttgaggtttggactactttcttcaaacttagagaattataacaggatggtgtttactttgttcacctggatgtccccaagactctagcttcttctatcagtggttggtctgatagaagaggtaaaaattgctcttgaaaatgtcctacaatttatgcagtttctttgataatatttttctgtttaaatccctgcttctgtttttggtctgttacctaaatatagttcaagtttaattctgtaagagcaaagaaatgaatttgatgaggaaattaagcatccaatggaggattggtcttgaagaccttaaaggtgctttccaacctgcactgctccagtgaaatgtggtacttttttcttttaaaagcaaccaagagagctgggaatatctgtgtacgcaaagtaattgcattttgtcccttcattttgactttcttagattcataatttgatacagtgcttaaacttccaaggaaattttaaacaattactacattacctgttcaaaataaggcttgttggaaatcctagtccatcaactaatttcaaaaatttatttttgatatgagtagcaacagctggtcatataccctatcccaaaaggaagaactgtcttgaacaagatgaatggaaaattgtggttaattctgaatttcatgtaatgacaacatattctttcataaaactatggcctgtttaagatggaactttgtgtgtgtctgctggggagggtggggtacatgtgtatggcgtgtgttcttgaaatgatgtctctctgaatatccaaaaaagtactgtactgtagaaatgctctttgaaaaagtctatcgactgaccatgatcaatctagcatatgtatgttcagtgggctagccttggtcctcagggacagtgtgtgactctagtggtcttcctaaccagtctcttgcctaaagatatctgggacctctactggctttaatgacaaataatgttatgttgaggttatgcttcctttgttatttgctgattttcctactaaatgtagcatttcaattagatccagctttcacattttgagataattgtaaaaagaatgaaattatgcagaaatggccaatatctcttatcaatctgttcttttggaaaccctcatgtactataaattgtgtacagttaaaaaaatatatatatatatatattcttacatgagtaaaaagcaccctctcccagcaatcgtatgccattggtatttgaagagaattcccaaataacccattgctgctgctgctgtttttgatttgtatgggtttttttgttttgtttgtttttgtgtggtaaactgatatttaaaaaaggaaaggagaaaaatcacgactactgtttacagactgaaaaattattgctttttatactactgagatcctaagttaagactctccaaagcaaacatttggtttaaatcatttatctgatgtagataaaaggtagagaaacttgtagtgttctccacataatggaaaatgtacaaatgcctagttgtgttgcccatcaattttgtatattttcataattttaattgttgaaaattgcattatattttgcaatcactatgttcaatctggatttgtctttcattttaacttttaatataaaaaggggtttcaatgtatctacaggcttgttattgaaacttcctacttatttgatgtgatttattaatataggaagtatatattcttccttaagtaagtgaagcatagcaaatctactttaaactggatgggttaatttatataaacattttcattttaagttggcaaaaaaa

SEQ ID NO: 384 - DNA, 1783 bp, Homo sapiens; identical to SEQ ID NO: 5

SEQ ID NO: 385 - DNA, 5260 bp, Homo sapiens
aaaatggcggcggcggcggcggcggctggtgctgcagggtcggcagctcccgcggcagcggccggcgccccgggatctgggggcgcaccctcagggtcgcagggggtgctgatcggggacaggctgtactccggggtgctcatcaccttggagaactgcctcctgcctgacgacaagctccgtttcacgccgtccatgtcgagcggcctcgacaccgacacagagaccgacctccgcgtggtgggctgcgagctcatccaggcggccggtatcctgctccgcctgccgcaggtggccatggctaccgggcaggtgttgttccagcggttcttttataccaagtccttcgtgaagcactccatggagcatgtgtcaatggcctgtgtccacctggcttccaagatagaagaggccccaagacgcatacgggacgtcatcaatgtgtttcaccgccttcgacagctgagagacaaaaagaagcccgtgcctctactactggatcaagattatgttaatttaaagaaccaaattataaaggcggaaagacgagttctcaaagagttgggtttctgcgtccatgtgaagcatcctcataagataatcgttatgtaccttcaggtgttagagtgtgagcgtaaccaacacctggtccagacctcatgggtagcctctgagggtaagtgactaagacttctcctctgctgtccaagcgctttggtgcagggacagcggcatcttcagccaatccagtgcaggctctccaccgaaggctggctctagactggtggtacgcacatagcatagccatggccgactcctgctgtggttctctgacgattgtgcttcttgttaatcctctgtcgtgctttggtaatcgtattgattagagttggtaactgtcttgacttgaattttgtccctttaaaactgctgtacctgtatgataaagatgcagtacctttctcttaaaaaaaaatgctatggaaagctgtgagaattgaagagacaaattggctgtgtcagtgtggggttatgtcatgatttctagaagccctgaagttgctcttttgagcagctttgcatgacacgctctggtaaaaggtgtgcatctttaaattatttcatggatactttgaaaaatattgtatcacttcaaatacagcaataagtttatatgttctcaagatttcatttgtttttaagaattttaagttcgtggattaatatcactacttgaatactgacagttgttgattagacaccgaaaggttactgattgttgaatgtatctgtgttagagctgtgcactggcacgcttgcatcaggggctggggccacacggccgccacacagattcccccgtgatgcctggagctgcttccagagccgggtgtctccaagaggcacctgtaggacttcccatttagaaatctcttgagtgggtttgtatgttaccttctccaaggtttatttaggacagagatattgctggaaggtcatgggtcagattccctcacaacccacctcgtctgcgggtgcagccccactccaaggctccccgttattggggtatgtgaggagcagtaaatataaaaccagttcaactgtcctcatggaatcaccctttctgtttttgcagtattcataaagctagtgtaaggtctggttttagtctattaaatcttagagatctaaaggaaatgctcaaaatgtagccaggttttaaatgctttaacttttaaaaaatgtaaatttttgtatgtttatagcttctaaatatgaaagttaaagaatgtactgtgatgaaatgttcagtattatgttgcttctcagtatcatgttgcttctcagtattgtgttgcttctgattctatgaatgttcattttaagaccccttgttgaaatgggacagttggcagcggctctgatgagcccgagaagaggcctgcccttgggtgcggagtctccctccgcacgatgctcccacgcgtccaacttgcacccaaggggcttttccctcttccaagtggactccttcaaggaagctgcagctcggtcagcagagaaggggcctgccgccagcgccctggaggaagaggaagaggaacccaagaggatggcttgtctcccagcagccacaccggctttgtgctcagccagttcatttgagtttgcatgtttctctgcactatggattttgagcatttagatttctttaatcaaaagcgttttagtgactccagtagacattttctttctgaggcatcgtgctttgcatgagagcaggccaaggttgaggggaaaagtaaagttaaagtcggttctctttcatagcaacacgtattgtctgacattcagccagctttttttttttctaataatttctgtgcctttctgtcctgtatttactgtatttagaaaaagcagctagaatatttctccattaactcttgagattcacaggactgtctagctctgagtcctagcaatagactccttagaggagtagtacgtttatctagattttctctagataatgcaggcggaagacctgggttcccgggtggggcattgcagttcttcctgtgtttggcttccaggaattacatgaacgacagccttcgcaccgacgtcttcgtgcggttccagccagagagcatcgcctgtgcctgcatttatcttgctgcccggacgctggagatccctttgcccaatcgtccccattggtttcttttgtttggagcaactgaagaagaaattcaggaaatctgcttaaagatcttgcagctttatgctcggaaaaaggttgatctcacacacctggagggtgaagtggaaaaaagaaagcacgctatcgaagaggcaaaggcccaagcccggggcctgttgcctgggggcacacaggtgctggatggtacctcggggttctctcctgcccccaagctgggctggagtgcaatggcgctgtctcagctcactgtaacctctgcctcccgggttcaagcgattctcctgcctcagcctcccaagtagctgggattgcagcctggagtgcagtggcgctatctgggatcactgcaagctccgcctaccagattctggtgattcttgtgcctcagcctcccaagtagctgggattgcaggcgcccaccaccacgctcagtggaatcccccaaagaaggtaaagggagcaagccttccccactgtctgtgaagaacaccaagaggaggctggagggcgccaagaaagccaaggcggacagccccgtgaacggcttgccaaaggggcgagagagtcggagtcggagccggagccgtgagcagagctactcgaggtccccatcccgatcagcgtctcctaagaggaggaaaagtgacagcggctccacatctggtgggtccaagtcgcagagccgctcccggagcaggagtgactccccaccgagacaggccccccgcagcgctccctacaaaggctctgagattcggggctcccggaagtccaaggactgcaagtacccccagaagccacacaagtctcggagccggagttcttcccgttctcgaagcaggtcacgggagcgggcggataatccgggaaaatacaagaagaaaagtcattactacagagatcagcgacgagagcgctcgaggtcgtatgaacgcacaggccgtcgctatgagcgggaccaccctgggcacagcaggcatcggaggtgaggcggggttgcagtgactggtggccgcaagcccttccctggggagtacctgatggctgccctttgacccccggtggctgccctttgacccccgggtgtgctctcagcgcaagtggtcctagaacaggattctttttggaaatgtctgtcgactggaccttggtggatttggaaatggaactgagggaccggtgacacgtgcttcagaccggtctggggtgcggcgcacacctgggcccgtgcagggctcagctcggcagcagctctgagggcagctcaatgaaaaagtgaatgcacacgcccttgttggcgtggcctggcatggcctggtgctatcggcagccgctctccactccccgactgatactcaattacgtgaagccaagaaagatgatttttagaacctttgcctatattaggttgtacttatgtacatattttgcagtgtttcacaggagaaagtggccttaactgccccttattctctctccacgttgtaaataaacatgtgtttaatacaagttaaagctatgtatgaaaactcagaacttgaatcccgtcagcttaaaacttgtgtagggaatcctgacttttaaaatgtgagggtatttggatctgtgttgaaagtcgtatatttttatctgtgcggtgctgagtgcaggccaccagctcctaaatagaggttccctatatgcgcgtatgacatggtgaataaacacaactctctccactcaggacatccggagcgttatggacgtggtaggtggtcgttctgtgtgcttgtgaaagtgtccaggcgtgtgcacagccagtgcgcccacttccgggctccttgctccctgctgtactgaagttttggattttgcatccaatcctgtgtgcctgcccttctgccgaaggcttgtgaggggcctgagtcctctgcccatcaggatgacaggctccttcctgcagggccataggagggaagttttggaaacacagaatgattccaaggtgctctcgttcctgagggggactggtttgtaacccatgacatctgtgggcgagagaggcagctgggagcaggacacttggagggtcacccacgggggtggcacctgcactctgagtgccccccactgtcatcagctgcctcttaccgtggacacagttttggttttggggactagggggccccactcctggtggtaccgtttggacttactagggcagtgggacatataggccggggctagtgggataacggggagttacgcctgatgacttttttgatggaatcctgcattagatagctggtgggaccccccctcagaattggggaactgaggagactccagggagggtgtccttccagggagagcagctatgaggggccccctagcttcctgtgcctggaagtaagagaaccagtaaagggccatacacacctgtacccaagagaccgctctccatttgctttctttttttactaaataattgtaaaatattattatgacataaagaaccatttaaggccaaaaaaaaaaaaaaaaaaaaaa

SEQ ID NO: 386 - DNA, 5583 bp, Homo sapiens; identical to SEQ ID NO: 55

SEQ ID NO: 387 - DNA, 2975 bp, Homo sapiens
gaattttctgcaaggatcatatctaagtgcactttttgctgatacttcatttctagacattgagtctcactctaccccccaggctgaagtgcagtggtgtgatctcggttcactgcaacctccgcctccaggttcaagtgattctcgtacctcagcctcccgagtagctgggattacaggcgcctgccaccatgcctggctgatatttatatttttagtagagatggagtttcaccatgttggccaggctggtctcgaactctggacctcagatcttgtagaaaatttcagctgtagcccttggactagaagctgaaataacagaagctgtgtacgatgcattagggtattgaagaaaattaacttttgaattaaatatttggaatataaggaaataaggaaagttgactgaaaatggggcggaagaaaatacaaatcacacgcataatggatgaaaggaaccgacaggtcacttttacaaagagaaagtttggattaatgaagaaagcctatgaacttagtgtgctctgtgactgtgaaatagcactcatcattttcaacagctctaacaaactgtttcaatatgctagcactgatatggacaaagttcttctcaagtatacagaatataatgaacctcatgaaagcagaaccaactcggatattgttgaggctctgaacaagaaggaacacagagggtgcgacagcccagaccctgatacttcatatgtgctaactccacatacagaagaaaaatataaaaaaattaatgaggaatttgataatatgatgcggaatcataaaatcgcacctggtctgccacctcagaacttttcaatgtctgtcacagttccagtgaccagccccaatgctttgtcctacactaacccagggagttcactggtgtccccatctttggcagccagctcaacgttaacagattcaagcatgctctctccacctcaaaccacattacatagaaatgtgtctcctggagctcctcagagaccaccaagtactggcaatgcaggtgggatgttgagcactacagacctcacagtgccaaatggagctggaagcagtccagtggggaatggatttgtaaactcaagagcttctccaaatttgattggagctactggtgcaaatagcttaggcaaagtcatgcctacaaagtctccccctccaccaggtggtggtaatcttggaatgaacagtaggaaaccagatcttcgagttgtcatccccccttcaagcaagggcatgatgcctccactatcggaggaagaggaattggagttgaacacccaaaggatcagtagttctcaagccactcaacctcttgctaccccagtcgtgtctgtgacaaccccaagcttgcctccgcaaggacttgtgtactcagcaatgccgactgcctacaacactgattattcactgaccagcgctgacctgtcagcccttcaaggcttcaactcgccaggaatgctgtcgctgggacaggtgtcggcctggcagcagcaccacctaggacaagcagccctcagctctcttgttgctggagggcagttatctcagggttccaatttatccattaataccaaccaaaacatcagcatcaagtccgaaccgatttcacctcctcgggatcgtatgaccccatcgggcttccagcagcagcagcagcagcagcagcagcagcagccgccgccaccaccgcagccccagccacaacccccgcagccccagccccgacaggaaatggggcgctcccctgtggacagtctgagcagctctagtagctcctatgatggcagtgatcgggaggatccacggggcgacttccattctccaattgtgcttggccgacccccaaacactgaggacagagaaagcccttctgtaaagcgaatgaggatggacgcgtgggtgacctaaggcttccaagctgatgtttgtacttttgtgttactgcagtgacctgccctacatatctaaatcggtaaataaggacatgagttaaatatatttatatgtacatacatatatatatccctttacatatatatgtatgtgggtgtgagtgtgtgtgtatgtgtgggtgtgtgttacatacacagaatcaggcacttacctgcaaactccttgtaggtctgcagatgtgtgtcccatggcagacaaagcaccctgtaggcacagacaagtctggcacttccttggactacttgtttcgtaaagataaccagtttttgcagagaaacgtgtacccatatataattctcccacactagcttgcagaaacctagagggccccctacttgttttatttaactgtgcagtgactgtagttacttaagagaaaatgctttgtagaacagagcagtagaaaagcaggaaccaagaaagcaatactgtacataaaatgtcatttatattttccaacctggcatgggtgtctgttgcaaaggggtgcatgggaaagggctgttgatattaaaaacaaacaaaacaaaaaagccccacacataactgttttgcacgtgcaaaaatgtattgggtcaagaagtgatctttagctaataaagaaagagaatagaaaacacgcatgagatattcagaaaatactagcctagaaatatagagcattaacaaaggaaaattaatatattaagttataattggaatatgtcagaagtttctttttacattcatatcttaaaaattaaagaaactgattttagctcatgtatattttatatgaaagaaaacacccttatgaattgatgactatatataaaattatattcactacttttgaacacattctgctatgaattatttatataagccaaagctatatgttgtaacttttttttagagaatagctttatcttggtttaactctttagttttattttaagaggggaaaacaaaaatatcttgcaagcagaaccttgaaaaaaaaaaaggaattc

SEQ ID NO: 388 - DNA, 8702 bp, Homo sapiens
aggtgacgcggccggcgtcccaagatggcggcggcggcggctcccggaaggccgcggcggcgtcccggctgctaaggcgggccccacgcggctggcagcggacaggccggacctacggccggaggacgggcggcagccgcctctgcgcggaccggggctgggccgtgcggcggcagcggcgccaggggatgctcttgctgggcctggcctctcccttctcaacttagggcggcggcgggcccgcgcccctggctcccgggccatggcgctgagggagctcaaagtgtgtctgctcggggatacaggtgtaggtaaatcgagtattgtgtggcggtttgtggaagacagttttgatccaaacatcaacccaacaataggggcatcttttatgaccaagactgtccagtaccaaaatgagctacataaattcctaatctgggatacagctggacaagaacgatttcgtgccttagcaccaatgtactatcgagggtcggctgcagctataatcgtttatgatatcacaaaagaagagacattttcaacattaaagaattgggtgaaagagcttcgacagcatggcccacctaatattgtagttgccattgcaggaaataaatgtgatcttatcgatgtaagagaagtcatggagagagatgcaaaggactacgccgactctattcatgcaatttttgtagagaccagcgcaaaaaacgcgataaacataaatgaactctttatagaaattagtcgaagaattccatccactgacgccaacctgccatctggcggtaagggcttcaaactccgaagacagccttcagagccaaagcggagctgctgctgaccgaacctcagcctctcagacttgatgatgaagtaggtggtcctgaaagttaacaggagggctggggtccctgccaccagttttcacctagccagtcttgagtcttctccgtgcaaaaaggattcacagaaatggaccagttctgttctccaaagactgcagcaatgatatttcagtctgtgaacttctattatgtaaagaatctctagtgtacaaagggactacatcgttggcttttgaccttgctgaaaaggaacatataattgtatggatggtaggattaagttgttgagtagttttgtaatcaagattttatgtaacatttgtaaagggaaaattagcacttttgtggttcttaagggaaaagaaacagaccttgtggagattataatttccttggtttctgttaccactgttagagggagttgtatcatttaacatatagtaggatagtttaagtgtagggaggacaattattgtctgaagctaaaatgggttatttataggactgatggaaatgatttcatctctgccatctctaaagcacttttcattgaacatgttagcctaggatacgtacagtaaattaacaatgatagcagcagatgcctagctcatcctgggtttgcttctgaccttgtcatgtgtgtgccaccaaacacgttattggcacctttttaaataagctctcatgatcaagatggtgatggtagagaagctgcccggaataaactgaatttcatatgttctaaaatgactagcaatggtttaaaaaggaagaagagtggaagtgaagaaggtggtataaatgctgtcaatttttttttaacccaagtattttggtggggaaaagcaagtatctattgcttagcatatgtaaagttgtagtctatatttatggggccattgcttaaagattataaattatgtaaatacattaataaattctaagtttcatttgacattccattgaatctcgcacccagtcttgcgtatgcctgcccagttttcagcctcttaacgggagactcaagcacattggtattgtataaaggtatagagcacttagcttacaatctttaaaggtttctctgccttcccttctacccacccgcctcccaccagatcccatctggaaatcataataaagacatatgccactttgacaaacctgactagtccttactagcctgagggtaaaagattaagctccaacctcaagtcatttacctggtcttggtaataagtttcttttagcttgtacagcatcctcagaccaactgaggagctttccttgttaacaatttagcttatctttctgtttcctttatttttcccctgcctctgttagtggttaacactcttttccctcagggagcctaatgaggtttttaatatcatctaaaaataaagcattgaagtgaagttggtgaaaatttgttcctggtctaatttggcacccttccaacctgagtattgtaggggaaggaaatttacaagatttaataggaaatgaaacagcttgaatttcaaactaaattgtattttcagagctatcctgaaactgaacagctgaaactttaaaaaataattggtattattttgtgccccccacttaatatggatagattttaatgggaaaattataattcagattaaataaaaaacaattcccttttccctgttgtatatcttaagcatttggaattttttttatcttctgaaatcatataaaaagaatgtcattagtaaaaattctaacttcgttttgtttaaaagacatgtggatgctccatgcccctaggattttgcttcctccccggtgctaaattagcaagctcctagagaagccatgtgattcccagagccaggcgctttacacctaaagtagtttgactttcttctgtatacatccagatggatcccaggcatccgggcaccaccctggtgtgtccctagaattcccactgctgggcctctatctccatgacaacaaaataaaaacagaggttgcttgactcattaccaaagaggcaaagcatgtgcgaccctttctgtcttattttaccaaaagatggtgcaaatctatgaccttcacattttttccaccacacccaccagtagctgttggtgattgcatggtgtctcggtgcatggggaaaggcaaggtcttctgagctcatcttaactggtgaggcatctggatgtgtctgatcttactgtgatgttttactgtaccgagcccaatgtgggtccatctcatcagccctttgctgatttcatgatttctcaccctccctcccatatgtagggtgtgattctgttttattatagccacatgttttattaacagaatgagtgatatgaagcttgtacttatgcatttctcgggcctcttccctcattttcatcagtctgtctaagaacttgactcggcactgtttctcgtgtaatatccttctaatgcttagcaacaacaacaaaaaattgctctctcagatccataatccatactcagtgaaagcagggaaaaaatattttcacttattttatttgcttctaaaatgcaaagatgaatactaaagtcagaagcagtgtttcattttgaacacattttggattattaagctgactaagcaatgatctaatacacatttcatattttctttataataatttcttatggagaagaggctatatttcaaaggaattgagacatactcccatctataaacatgtttggttttcttacgatacagggccatttttttaaaactctcaggactgaacagaagagaaaaattattaattagctgctactgtatgttgattcttttcggagaaattgaaataagctctttgcaggcgtccaatcctagaaaccaatggtctccagaactctcacacaagtgtttttctgattctatgataactaattaaccatcatctggtgattaaaagaacataaagtaagattatgattaagtgtccatcacctgcctgtcagccgtggtcagaataagttttacacgaagcaggtgaaagatttagttcttttcaaagtaacttattttcttgtgacccgtttatgatgttgtttgaagtccctgtttcccattgtgtacgcactttctggatgtctggaaggatcgggacttttgtgtgagaggcttgagcgcctcctctatgtgggctggtgtccttcttgaagttgtcaattcctcttattcttaaatatctaaagggaaaggaaaccaactttaatttcagaacttctctttacgtcttgtatgtatttcttttctgttctcaaggaggaaaattggtctaggaagccttctaaattaaactctgggaaatatagtaatgaaaatatcctttagctaactttcctgtaactgtcaaaccaaaatgtcagtatttttagggcattgtgttaaaataagcagtttagattccgacgacactgcactaattggcatgtcagcctccagctcagaaaggcatttgctcatggttacaggcatcttttagattctaagagtgagttacagaattctttttggtactttcacttattctttcagaatacatcaaggatgtgatttatgggcccttaagagtataagatataggtgcacagtatgttacttaagtaacggatgagcccccctaaacatccacgtgtctctgcaggaacctgtgtaagtattgtgaaaacccttttcttccagggaaaaattattggaaattccttaactgagctatacttggtacttgctctagaacatttgggaaatgacaaactcaggctggctctcctctctaacctcactgggctataaatgttccttctaactctgtaatgaaagttcagtgacaaactagatagtgaacctgtgaaagtcattatttacatttgctttaaagggacagttttaccgttcaacttcaagagtttttctacctctttaacagttaatattttttaaaggaagaaatggaatgtaccttcaggggtcaagctgttaactgtatacctgcctctagttagcttggtttatcaaaaggatttttaaatgattcaaggtaatgtttaggatatttgttttaactcctgctgtgctgtgatttaaaaaaaaatagtctaagaaacaaatttatccatgagataaacatcatattttatagttttagaaaaaagggttgggggtggaatttagcctagaacttaaagaaacaacctctgcgaatttctcttgacagcggagttgcttgtcttgacttctaataatataaatccaggcagtttgattatccgatttgcaagaaactttaatggaattctggggcatttgtcctgttttatgtgcaaatgaaagtctaaaaaatatgaggaagatattacatttttcaggagcctccattttttcagtctaagagaatgataagtgagaggcctattgtgatgaagttgcattggacataatgtgggaagtgaataaatagaaccaagaatcttcatctatctctgttggtctttcaggattctcttagcatataggaaaatgatttaccttccagatctcgaaggacttccaatagcatagatcaggtttaatttgatggtctataccatcagaaataactaatatctgttttctttccttttagagtataatcaattatggataggccagaatatttttggcttcaaaacaaaaggattcataagcttaaaaaaacaaaaatcccaaaccttccatctatcccttttattacgttgaacattttagatagtaagattaagatgtatcattagtatatggtgaaattaaaaccgtggtgtctaacagatttaacaaaaagtgtttaatttactgcaagttcatttttagatctgtatggtgcccagtactccacaaaatgcatcataattgaaacaacaaaattattttcatgagcaagaattcaagtatcaaggcctatcagccaattaaaagccgtaagatagtaatgattttttttctttttttttttttttctttttttagatggagtctcactctgtcgcccaggctggtatgcagtggcgcgatctcagctcactgcaacctgtctcctgggttcaagcagttctcctgcctcagcctcctgagtagctgggatgacaggcgtgcaccaccatacccagctaatttttgtatttttagtagagatggggtttcaccatgtttgccaggctggtctcgaactcctgacctcaggtgatctgcttgcctcggcttcgcaacattctgggattacagacgtgagccaccgcgcccaaccagtaacgatttttttaaagggcctttcttaattgacagttttaagctgtagacattaatattataacaaacaaaacatgccagttttactgattccgctttttgcttgattcaggaacttttcattgtttggggaagcttttgaatgcagtactgtggaggaaatcatccttaaaatagcatttcacacatagggccaaaattgaaattgtcaaggaaacccctcagcatctaacgtcatcttgtagaagagctgggcatacctcttcctctaggccaattcagaggccactggccacccaagtagagtggggcccactggcatgagtagtccctgtgcccatgcccatggtggtgcttgactttgctttggggcttaatcctagtatcatttggccattaatttttaattaagtttatacttgaataatcagttttactcctgaaaaattttgaagccagcactgactttgtttatattcacttaccttgtatatgaacttatgacattagagtttgtgaaactgtcttaacgtggctcatacacgtgatgtcagagggactggtcagttctttacagggtgaattaatcggcagctggctagtcagagcaactgatgggtggcttttttttctttttttttttgagacggagtctcgctctgtcacccaggctggagtgtaagggcgcgatctcggctcactgcaacctccgcctcccaggttcaagcaattctcctgcctcagccacctgaatagctaggattacaggcgcccgcccccacacccggctaatattttttgtatttttagtagagacagggtttcaccgtgttgatcaggctggtctcgaactcctgacctcacgatccgcccgcctcggcctcccaaagtgctgggattacaggcgtgagtggtggccctatttttaaaccattcgttacgctgtgtagacagagctttattgccctggaaaagattttttttttaactctcatgcagttcagtctttccatcatttcactttgtgagtcactcacataattgtcaatcattcctctgaccttcttaagaatttacaccttaccgtctctgtgattgaagcagacttctcgctttatttcccttaggctcatttttctgtgggctctcccttaaagacacatggccacagacacctccttcgcatatgtaatctgccttcccctgcggccttccgtggtcacagcaacagggactgctcaccccctccagctggggcttttctaacaagcacagtcagaaatgcgcaggcctggggttggggatgaacagaagttgattagtgggcacagaaatacagttagatagaaggaatagttccagcattcgatattacagtagggagactgcatttaacaataattgattgtatatttgaaaacagctagaagaataagaatattcccaacacaaagaaaagataagcgaggtgaaggaaatcccagttaccctcattcagtccattacacattcgatacaggtatcaaaatatcataggcacctcaaagacatgtacaactcttaatttaacatttttgaaagaaaaaaaaaccggccagagcattaaaacaaataaaataagaaacacagaggccagtgttaggtgaagaactccgctgcttcagaaagagaatagcagcgctcgcttaccgtgggaacacggccagttaacaaaatgggttttggttttttgttttgttttgttttaccattggtaataagatagttaacataagtggtcagaacttcgctgaatttgtaataaagcatttgttaagcgtgtaaaagtccaaattaaaagtcttgaagaaaaacagctatggcaatgagcctagacatttttcaaaaaaaaaagctaagccgtcctaccagcaatctctctttctcctaagaatgtcatgccttctcaagacctgatgaaaggaataagatatttgtgcctttttataaaagcatctattacgaaagtaaaattcagttgcttacagttttggccgctttgtagcactattataaacagcccaaatttatggccttggacttactgcatgacacatggcctggttacctgtcatggaatgctgcagtggtggtttgccaagcttctgtggatgtttgaagactttatttttgcagtcttaaccttgggctggacctaagtgtatgtaaaccatatgatgcctgtattgtttatagatgctgacaaaagaaaactagaccttttgttttttgttgtaagatttttgttttcatgcctatgctcatagtagatagtttgcaaatgaaagttgatttgccatacttttaaataatattgttttagcttgaatattctataatacacttttatagagtataacatgctaaatcactgttttgttgtaagaagggtgtaaacattttgttaataaaatgctatgtttacaaatataaaaaaaaaaaaaaaaaaaaaaaaaaaaaaaaaaaaaaaaaaaaaaaaaaaa

SEQ ID NO: 389 - DNA, 3997 bp, Homo sapiens
ggcgacgccgacgcgagtctggcggctgctgcttgcgactgcggaggccgggcgaggccggtgaggacgcggcgggcgagcgagaggccgaggtgttttcttcactcatggtgaagaatgggggagatagaaggaacatacagagtcctgcagactgcagggatgcgcttgggtgcccagacccctgtgggagttagcacccttgagcctgggcagactctcttgcccagaatgcaagagaagcacctgcacctcagagtaaagctgctggacaacaccatggaaatatttgacattgagcctaaatgcgatggccaggtattactgacacaagtgtggaagcgtttaaacctggtagaatgtgactacttcgggatggagtttcaaaatactcagtcctactggatttggcttgaacctatgaaacccatcattaggcaaatacgaaggccaaagaatgtggtgcttcgcctagctgtaaaattttttccacctgatcctggtcagctacaagaagaatatacaagatacttgtttgccttgcaacttaagagagacctgctggaagagcgtttgacctgtgctgacaccacagcggcccttctcacgtcccatctcctgcagtcggaaataggagattacgatgaaacgctggaccgagagcacctcaaagtgaacgagtatttgcctggccagcagcactgccttgagaagatactagaattccatcagaagcacgtgggccagacacctgctgagtcggatttccaggtgctcgaaattgctcgaaagttggaaatgtacggcatcagatttcacatggcttctgacagggaaggaaccaagattcaactggcagtttcccacatgggtgtactcgtgttccagggcaccaccaaaatcaacactttcaactggtccaaggtccgtaaactaagcttcaagaggaaaagatttcttatcaaacttcatccagaggttcatggaccttaccaggacacattagaatttttgttgggtagtagagatgaatgtaagaacttctggaagatttgtgtggagtatcacaccttttttagacttttggaccaacctaagccaaaagcaaaagccgtcttcttcagccggggctcctccttcagatacagtggaagaactcagaaacaactagtagattatttcaaagacagtggaatgaagagaattccatatgaaagaaggcacagcaagacccacacgtccgttcgagctctgactgcagacctaccaaaacagagcatctcattccccgagggattgaggactcctgcctccccatcttcagcgaatgccttttactcgctctctccctccactctggtcccctctggcctgccagagtttaaggacagcagcagctccctcacagatccccaggtttcctacgtcaagagtccagctgcagagaggcgcagtggagcagtggctggaggccccgacacaccatcggcccagcccctcgggccccccgcactccagcctggtccaggcctttccacgaagagtcctcagccttctccctccagccggaagagccccctgagtctgagccctgcatttcaggtgcctttgggcccagctgaacagggctcatccccactcctgagccctgtcctcagtgatgctggcggagccgggatggactgcgaggagcccagacacaagcgcgtgcctgcagacgaggcctacttcatagtcaaagagattctcgctacagaacgaacatacctcaaggatttagaagttattaccgtgtggttccgcagcgcagtggtgaaggaggacgccatgcctgcgactctgatgacgctgctcttctccaacatcgatcccatctatgagttccacagaggcttcctgcgcgaggtggagcagaggctggcactctgggaagggccctccaaagcccacacaaaaggcagtcatcaacgaatcggggacatcctgctcaggaacatgcgccagttaaaggagtttaccagctacttccaaagacatgacgaggtcctaacagaactggaaaaggctaccaaacgctgtaagaagttggaggcagtgtacaaggagtttgagctgcagaaggtctgctacttgcctctcaacacgttcctgctgaagcccatccagcggctgctgcactaccgcctgctgctgcgccgcctatgcggacattacagccccgggcaccatgactacgctgactgccatgacgccctgaaagccatcacagaggtgaccaccacactacagcacattctcatccggctggagaacctgcagaagctaacggagctgcagcgggacctggtgggcatagagaacctcattgctcctggcagggagttcatccgtgagggctgccttcacaagctcaccaagaagggcctgcagcagaggatgttttttctgttctcagatatgttgctgtacacaagcaaaggagttgcagggaccagccacttccggatccggggcctccttcccctccaaggcatgctggtggaagaaagtgataacgagtggtctgttccacactgtttcaccatctacgcggctcagaaaacaatcgtggtggcagccagcactcggctggagaaagagaagtggatgctggacctgaactccgcgatccaagcagccaagagtggcggtgacacggcccctgcactgccaggccgcactgtgtgcactcgtccccccagatcccccaacgaggtatctctggagcaggagtcagaagatgatgctcggggtgtccgcagctccctggaggggcatggccagcaccgggccaacaccacaatgcacgtgtgctggtaccggaacaccagcgtgtccagggcagaccacagtgcagctgtcgagaaccagctttcaggatatctgctaagaaagttcaaaaacagtcatggctggcagaagctctgggtcgtctttaccaacttctgtttgttcttctacaaaactcatcaggatgactacccactggccagcctcccgctgctgggctacagcgtgagcatccccagggaggccgatggcatacacaaagactatgttttcaagctccagttcaaatcccacgtctacttcttccgggctgagagcaagtacacatttgaaaggtggatggaggtgatccagggggccagcagctcagccgggagggccccaagcatcgtgcaggatggcccccaaccctcctcagggctggaggggatggtcagggggaaggaggaatgacgctcaacctgcccaggtttggacacaactacaaagaacagcaggacacagaggtgacctctgtcctgaggcttctcaacagatgggaagtggctgtggtctcactggatccccactggcaccagcagtgtgggtgggcctcatgtaacatctgggaggggcttcatccccccacccaggacctagtgcatgccagcagctatctggggccctgggaaaaatgtgcgagtcttgagcgcggagccgctcaagccacagctcccaggcccctggctcaaagacgcagacaaggcctgagcagtgctctcggcatcggaccaaagcctgggcacaccctgcctctctccccagagcagggtccctgccgaggactggcctagagcaagcactggaaaagaggccctgccatacaccctgcgtacccactgccaggaccctctcagacaagcgtggcacagccatgctgaccttccatctggtgaaccaagtggcagccccaggggcctgccctgcaggtcacagctaaacaagtctggcagaagccacgcttgttccccatgtacctctagagaagcagaaaccaaagtccccctgtgccctgggagggtggggccgtctaatttattactgcccagcattccttccaacgggaagtagatgggcgactgctttgttcacacacatttgattaaaaataaacaaacagcatctcccc

SEQ ID NO: 390 - DNA, 7241 bp, Homo sapiens
ggaaagaagtggaataattaggaacctagggtggggtagggtagcaggacatttcaaacattaatgagcatatgagattccaggtcttgttaaaatgcaaattctgattcagctggtaggtgaggtctgagattgtgcatttctaacaagcactcagataatcttaaggctgttggccccagggtcacacttatagtgattttctagaacccagttggggaagtgaatcttgggcaggagaaatacacacctcttgcattgagtttggagatctcatctgatataactttttaagaaagaaaaataattttccaaatatccaattgataagctttcccactaagtggctttcccactaagtggctgcgttatgaaaattgcttcactttgaaacttctggtcttggtaatatagaatttctgtgttctcacagtgcttgattgagaatatgatattgagattatggcataaaatatagtggctgtacaaaaaaaaatacattattaggatctctaacaattatgtaaaagtcattgcttcatgggtagagctcaaactttggtgtgagacctggttttattcttggcacttactctgagttgtcttaggcaaattaataccttaagcaaaaatattctcatgtacattttacatgagaattataaatgaagtacataaagtccagcagtcacaaatgttatctattattaccatcgtcctaagactgcaatcagctatagtgaaagtagtctcaaagattgtttcataaatcatcagattcacctaattttctaaagaatttaaataaggagatggaatgaatagattgcattttgtttccatgcacaggggaactgtgcatatttcttctgtgactcggaaatggtttaacttttaaaaatcccaaaatagctgaagttagcagacatgcaatttaccaaggatgattggaatttttatctttcctgtaataatactatacccaagcacactgctcatgaggaaaacatttttatgtgaatcttttactcttgggggcaaagaatgctgtttttctttttgataactatgtttatagaatctaaatcaccctgagcaattatttcaacatctaaagttattattaccattcatgtttcatttatagctatttgaattttgatgaatttcaatatggtgctacagtgatagggcaagtgcaaataagttcaatatatgggtacggtctaaagctattttaatttttttattacaactgctatgaagaaaattaggatatgccatattttcacgttttacagttggatgtcctatgatgttctcttccagagaacagagctcggagctctggaaatttggaggcaactgatatgtgctcatgtctgcatctgtgtgggttggctgtatctcagggacagagtctgcagcaaaaaagatataattttgaggactgaacaaaattcaggaaggactattctcattaaggcagtaacagagaagaattttgaaacaaaagattttcgagcctctctagaaaatggtgttctgctgtgtgatttgattaataagcttaaacctggcgtcattaagaagatcaatagactgtctacaccaatagcaggattggataatataaacgttttcttgaaagcttgtgaacagattggattgaaagaagcccagcttttccatcctggagatctacaggatttatcaaatcgagtcactgtcaagcaagaagagactgacaggagagtgaaaaatgttttgataacattgtactggctgggaagaaaagcacaaagcaacccgtactataatggtccccatcttaatttgaaagcgtttgagaatcttttaggacaagcactgacgaaggcactcgaagactccagcttcctgaaaagaagtggcagggacagtggctacggtgacatctggtgtcctgaacgtggagaatttcttgctcctccaaggcaccataagagagaagattcctttgaaagcttggactctttgggctcgaggtcattgacaagctgctcctctgatatcacgttgagaggggggcgtgaaggttttgaaagtgacacagattcggaatttacattcaagatgcaggattataataaagatgatatgtcgtatcgaaggatttcggctgttgagccaaagactgcgttacccttcaatcgttttttacccaacaaaagtagacagccatcctatgtaccagcacctctgagaaagaaaaagccagacaaacatgaggataacagaagaagttgggcaagcccggtttatacagaagcagatggaacattttcaagactctttcaaaagatttatggtgagaatgggagtaagtccatgagtgatgtcagcgcagaagatgttcaaaacttgcgtcagctgcgttacgaggagatgcagaaaataaaatcacaattaaaagaacaagatcagaaatggcaggatgaccttgcaaaatggaaagatcgtcgaaaaagttacacttcagatctgcagaagaaaaaagaagagagagaagaaattgaaaagcaggcacttgagaagtctaagagaagctctaagacgtttaaggaaatgctgcaggacagggaatcccaaaatcaaaagtctacagttccgtcaagaaggagaatgtattcttttgatgatgtgctggaggaaggaaagcgaccccctacaatgactgtgtcagaagcaagttaccagagtgagagagtagaagagaagggagcaacttatccttcagaaattcccaaagaagattctaccacttttgcaaaaagagaggaccgtgtaacaactgaaattcagcttccttctcaaagtcctgtggaagaacaaagcccagcctctttgtcttctctgcgttcacggagcacacaaatggaatcaactcgtgtttcagcttctctccccagaagttaccggaaaactgatacagtcaggttaacatctgtggtcacaccaagaccctttggctctcagacaaggggaatctcatcactccccagatcttacacgatggatgatgcttggaagtataatggagatgttgaagacattaagagaactccaaacaatgtggtcagcacccctgcaccaagcccggacgcaagccaactggcttcaagcttatctagccagaaagaggtagcagcaacagaagaagatgtgacaaggctgccctctcctacatcccccttctcatctctttcccaagaccaggctgccacttctaaagccacattgtcttccacatctggtcttgatttaatgtctgaatctggagaaggggaaatctccccacaaagagaagtctcaagatcccaggatcagttcagtgatatgagaatcagcataaaccagacgcctgggaagagtcttgactttgggtttacaataaaatgggatattcctgggatcttcgtagcatcagttgaagcaggtagcccagcagaattttctcagctacaagtagatgatgaaattattgctattaacaacaccaagttttcatataacgattcaaaagagtgggaggaagccatggctaaggctcaagaaactggacacctagtgatggatgtgaggcgctatggaaaggctggttcacctgaaacaaagtggattgatgcaacttctggaatttacaactcagaaaaatcttcaaatctatctgtaacaactgatttctccgaaagccttcagagttctaatattgaatccaaagaaatcaatggaattcatgatgaaagcaatgcttttgaatcaaaagcatctgaatccatttctttgaaaaacttaaaaaggcgatcacaattttttgaacaaggaagctctgattcggtggttcctgatcttccagttccaaccatcagtgccccgagtcgctgggtgtgggatcaagaggaggagcggaagcggcaggagaggtggcagaaggagcaggaccgcctactgcaggaaaaatatcaacgtgagcaggagaaactgagggaagagtggcaaagggccaaacaggaggcagagagagagaattccaagtacttggatgaggaactgatggtcctaagctcaaacagcatgtctctgaccacacgggagccctctcttgccacctgggaagctacctggagtgaagggtccaagtcttcagacagagaaggaacccgagcaggagaagaggagaggagacagccacaagaggaagttgttcatgaggaccaaggaaagaagccgcaggatcagcttgttattgagagagagaggaaatgggagcaacagcttcaggaagagcaagagcaaaagcggcttcaggctgaggctgaggagcagaagcgtcctgcggaggagcagaagcgccaggcagagatagagcgggaaacatcagtcagaatataccagtacaggaggcctgttgattcctatgatataccaaagacagaagaagcatcttcaggttttcttcctggtgacaggaataaatccagatctactactgaactggatgattactccacaaataaaaatggaaacaataaatatttagaccaaattgggaacatgacctcttcacagaggagatccaagaaagaacaagtaccatcaggagcagaattggagaggcaacaaatccttcaggaaatgaggaagagaacaccccttcacaatgacaacagctggatccgacagcgcagtgccagtgtcaacaaagagcctgttagtcttcctgggatcatgagaagaggcgaatctttagataacctggactccccccgatccaattcttggagacagcctccttggctcaatcagcccacaggattctatgcttcttcctctgtgcaagactttagtcgcccaccacctcagctggtgtccacatcaaaccgtgcctacatgcggaacccctcctccagcgtgcccccaccttcagctggctccgtgaagacctccaccacaggtgtggccaccacacagtcccccaccccgagaagccattccccttcagcttcacagtcaggctctcagctgcgtaacaggtcagtcagtgggaagcgcatatgctcctactgcaataacattctgggcaaaggagccgccatgatcatcgagtccctgggtctttgttatcatttgcattgttttaagtgtgttgcctgtgagtgtgacctcggaggctcttcctcaggagctgaagtcaggatcagaaaccaccaactgtactgcaacgactgctatctcagattcaaatctggacggccaaccgccatgtgatgtaagcctccatacgaaagcactgttgcagatagaagaagaggtggttgctgctcatgtagatctataaatatgtgttgtatgtcttttttgctttttttttaaaaaaaagaataactttttttgcctctttagattacatagaagcattgtagtcttggtagaaccagtatttttgttgtttatttataaggtaattgtgtgtggggaaaagtgcagtatttacctgttgaattcagcatcttgagagcacaagggaaaaaataagaacctacgaatatttttgaggcagataatgatctagtttgactttctagttagtggtgttttgaagagggtattttattgttttttaaaaaaaggttcttaaacattatttgaaatagttaatataaatacataattgcatttgctctgtttattgtaatgtattctaaattaatgcagaaccatatggaaaatttcattaaaatctatccccaaatgtgctttctgtatccttccttctacctattattctgatttttaaaaatgcagttaatgtaccatttatttgcttgatgaagggagctctattttctttaccagaaatgttgctaagtaattcccaatagaaagctgcttattttcattaatgaaaaataaccatggtttgtatactagaagtcttcttcagaaactggtgagcctttctgttcaattgcatttgtaaataaacttgctgatgcatttaacgagtgggtcgtctttttcttaggtgtatgtgtctgacctcaggccttttagccatatttcagtatgtggccttttttgatgttatgttttatccagtagctttactaaggtataattgatgtaataaactgcatatatttaaagtgtatactttgacaaattttgacatggtgtataccttcgaaactatgccacagtctggatgtgtttactgaaacattttaataaggaagtttatttttgataaagttatgtttttggatacaatatatttgtatggtgagagtgatgaattgttggatcatttgaataaaatcttttactaaccccatgataaaaggagaagacaacagtgagcttagaatatctataaagcaaaaaatgtagtctcttgtttaaaaaatctggagcgggaatgcaaggatacaaaactttagcatgctttgagcaaaaatttaaacttactggaatcttttataataatgtaagtggaatggaggattctaggaactgagaactgtattggaataggttcaaaatatgtaagaaatgctaatgtgggagataaaaattttatttagtacttattctgattattattaaagtaataatgtgttccttgaggataacttgtcaaatgccccaaagcataaagaatataattctgaatcccaaattccaaagacaagaactctgtgtttgaattcattctgcatataattatttataagtatagattgtgaatttttccatgttcttaaaattatttttatcttttttcatggttgcatagtgctccattgtttggccttggtaatatttagttgataattccattactgtgtatttttcacttgtttctaagatcaaacattttaatatgtgcatgttatatataaatatgtaaattctgtgatactctatgatcatctctttctttatattattttcatagacatgaaatagttgctcagagattatgcattttaagacactcatagtatatattgccaaagtggtttccagaaaggcactgctggcttcgactcctataagcagcacgtgggcttgttcatctcactgcatgtttatgaagatacagttcttttgccttgttctctgcctgatgtgtatgcagaggcagccctcaatatgcagtggttgaataaatgaatgaagaaaccactaaaaaaaaa

SEQ ID NO: 391 - DNA, 4646 bp, Homo sapiens
gggaggcggtggccgaggcccaggcggtggcggcggcggcccaggaggcggcggacggggagctgcgggagcaggcccgggcctggctctctagcggccgcctggctgcagcatgcgcgcccgccgggggctgctgcggctgccgcgccgctcgctgctcgccgcgctcttcttcttttctctctcgtcctcgctgctgtacttcgtctatgtggcgcccggcatagtgaacacctacctcttcatgatgcaagcccaaggcattctgatccgggacaacgtgagaacaatcggtgctcaggtttatgagcaggtgcttcggagtgcttatgccaagaggaacagcagtgtaaatgactcagattatcctcttgacttgaaccacagtgaaaccttcctgcaaactacaacatttcttcctgaagacttcacctactttgcaaaccatacctgccctgaaagactcccttccatgaagggcccaatagacataaacatgagtgaaattggaatggattacattcatgaactcttctccaaagacccaaccatcaagctcggaggtcactggaagccttctgattgcatgcctcggtggaaggtggcgatccttatccccttccggaaccgccacgagcacctcccagtcctgttcagacacctgcttcccatgctccagcgccagcgcttgcagtttgcattttatgtggttgaacaagttggtacccaaccctttaatcgagccatgcttttcaacgttggctttcaagaggcaatgaaagacttggattgggactgtttgatttttcatgatgtagatcacataccggaaagtgatcgcaactattatggatgtggacagatgccgaggcattttgcaaccaaattggataagtatatgtatctgcttccttataccgagttctttggcggagtgagtggcttaacagtggaacaatttcggaaaatcaatggctttcctaatgctttctggggttggggtggagaagatgacgacctctggaacagagtacagaatgcaggctattctgtgagccggccagagggtgacacaggaaagtacaagtccattcctcatcaccatcgaggagaagtccagtttcttggaaggtatgctctgctgaggaagtcaaaagaacggcaagggctggatggcctcaacaacctgaactactttgcaaacatcacatacgacgccttgtataaaaacataactgtcaacctgacacccgagctggctcaggtgaacgagtactgagaggagagaatgtacgtttgctttacccaccgccaccaagaaagcagtccgatgagatttttttttggaggggggagggtctacacagcaagagaacagaaatactgtgtctcatgaaggatcacagagttcagggggaaaatgtgacagcacacgcacaaacgccttcactggatcagccgctggaactgagggagtgagcttggggacttccttcgtcagcactggctttctgttttcacaagacagacgtctgtcccgctgctctctccccatctcctaccccacatcctgtcttagccgcagtctccagaacccatgatgaactgtgatctgccgtggtcctgccgtggtcctgccgtggagcctgtccctacacatgaccttggagcctcttggccttcagagcagaggcaaacccaccacagggcagctgcgttttaggaagagcaaatgaaactccacaccattcttctagatctctggtgttctctttggtttcatttttttaaaaaattaccttctttgggtggggattgagggtggaggggagggtgtttgggaaagataaatagacataaatatataacaatcacttcttgaagaagtataattgtaaataagccatgtaaaatgcctttttaaaatttaattttctagctggctccaattcaaattgaggatttatgtattaggccacttacttggttggcaagtgcaggaactcagttaaaatgcagttgaagaatgtcatctcccgaattgctgtcactttggcgagggagtggatatagggcatgtcacaaaagaacaaaataacccgacctttattgctgggagctggcttctgtccctttcttcccccccccacgagtcttgcccttgacttctgctctggattcactcttccctgtcggccgcgcatgtgctcatcccactctccgctaagcgggaggctgctgttagagcaggctgcttcctgcctaaagcaggcccttcggggctcgctgcacacacatctctggctctccaggcttcgtgttctgtcttttcatcagcatggcggggcggggggcggggggcgggggtgtgtatgggaatccctccccctcttactttttctcttgtggaacttggccacagtttctgaacaatgtgcctacattaccagctggcttcagtgattcctctgtgtccctttttggtttctggaaagattctttgtcaacattagtaactgatacatagaaccaaggagcactcaaatagggagccaggagccagggagctggtgacacttgtgtgctgtggggcagctgggatccaggtaagaccggattgaagctttgaaattagactaacaaagctccagacagcaagagcccaggtgcactgctcacacccccacctgcattttgaagtcatattattttttgttttgttttttaagacggtctggctctgtcgcctaagctggagtgtggtggcacgatcacagctcactgcagcctccatctcctaggctcaagccattttcccacctcagcctcccgagtagctgggactacaggtgcacaccaccacacctggctaattttttgtatttttagtagagacaggggtttcttccatgttgcccaggctggtctcgaactcctggactcaagcaatccgcccaccttgacttcccaaagtgctgggattatgggcgggtgtgagccattgcgcccagccttgaagtcatgttctaaattgtatttgaatttgtgcctctttgtttttccccaaaccaaagccctcaaattgtagtctctgtcggcttctgcagaattctggaaaatgccagttttcctcccccgcccttgttttccataaaacatatttatatattgtgatgaggagtactttctgaagagtacttcgtatttttttttaattgccttgtttgccttcaacttccttgattttcatagtttacatgggtgtgtgtaggggtgtgtgtgtgtatgtgtgtgggttagggcttttttcgttgcatgtgatggttctgtggacatatgatccccacaaactgtgggagtgattggccaggccttgttttgtttgtttgtttgtttgtgtttttgttcttttgaagaatagagtggtatttagaaaataaattgcattgcaaagctcttatcggctcatatgagagagcaggttcctgcccttgaaaatgccggtaagctatagcatatgttttttaagacttaagcatttcatgctttaaaataccttcacaagtgaacattacacacagaagttcatttggttttcctttgttttatggtgcatatagcaataaagacccccctccaccctgcaacccccatcccccaccgggcctttgtccctgccttggcttttctccccttctcattctcctctcccctttcctcactgaaggctgtgagttgctttcaatgtgacaacactatgatgtcatttggaaggatttgccaggacagactgattctgagtcctgggtgccgtatgtgtatgcggcagtgttgtcaggcgatcttgtttgaagctctatgttgccataattaccatcaagtacacactgttggcaaaaggctaacacctgactttagaaaatgctgatttgagaacaaaaggaaaggtcttttttcactgcttaaagtggggtcactttgatacctttgcggtcatgtctgtgtctgatgagtgtagaatctctggatgtgcactgtcagtcatgtgtccaccaggcctcgaatatcatatgggaaatgtcatagttaaaaacgtacagccaggcccgtgtgctgttaatagtgtgaaattgtcatgttaaaaaaaaaaacaggaaccaaatgtgaccttgtgcatatattggtagctgaaaatcttcaaggctactgatgggtggccccttaatcttgtctttgattgctgtgtgcagggaaaggtgtccccgtttgttcatgctgttttggggggtgggggggtatttgcaagaatactcattttgacataataggtcctcttgtcagagatcctctaccacagacattaatagctgagcaggagccacatggattgattgtatccactcaccattgacgatggcattgagcgtagctagcttatttccatcactacgtgtttttgagcttgctcttacgttttaagaggtgccaggggtacatttttgcactgaaatctaaagatgttttaaaaaacacttttcacaaaaatagtcctttgtcattacattatttactcatgtgtttgtacatttttgtatgttaatttatgaatgattttttcagtaaaaaatacatattcaagaaccaaa

SEQ ID NO: 392 - DNA, 5184 bp, Homo sapiens
acaaaaccctgcaggagactgcgagccctgcagaactgctagctgcgggggagagggcaggggtcgggcgcctgtggcggagccgggctggggccagggcagggaggctgacaagcggcgggagaagccggcggagggcgggatcgcgcctcctgacatgttgggggtatccctggccgggccgggccggggctaagagcggcgctgcgggccggggtcggggtcgggtcgcggtccgcccccgctgtccctccgtcctgccctgtcgaggacgtgcgttccgcactcggccgcctccagagggagcgagggaagcggctagaggatcggggagaaggagcattcgccggaggctggaggaggctgacccgcgtccccgcccagcctgctcctatgcggtacttgaaggatggcgaagaggtcgcgcagtgaggatgaggatgatgaccttcagtatgccgatcatgattatgaagtaccacaacaaaaaggactgaagaaactctggaacagagtaaaatggacaagggacgaggatgataaattaaagaagttggttgaacaacatggaactgatgattggactctaattgctagtcatcttcaaaatcgctctgattttcagtgccagcatcgatggcagaaagttttaaatcctgaattgataaagggtccttggactaaagaagaagatcagagggttattgaattagttcagaaatatgggccaaaaagatggtctttaattgcaaaacatttaaaaggaagaataggcaagcagtgtagagaaagatggcataatcatctgaatcctgaggtaaagaaatcttcctggacagaagaggaggacaggatcatctatgaagcacataagcggttgggaaatcgttgggcagaaattgccaaactacttccaggaaggactgataattctatcaaaaatcattggaattctactatgcgaagaaaagtggaacaggagggctatttacaagatggaataaaatcagaacgatcttcatctaaacttcaacacaaaccttgtgcagctatggatcatatgcaaacccagaatcagttttacatacctgttcagatccctgggtatcagtatgtgtcacctgaaggcaattgtatagaacatgttcagcctacttctgcctttattcagcaacccttcattgatgaagatcctgataaggaaaagaaaataaaggaacttgagatgcttcttatgtcagctgagaatgaagttagaagaaagcgaattccatcacagcctggaagtttttctagctggtctggtagtttcctcatggatgataacatgtctaatactctaaatagccttgacgagcacactagtgagttttacagtatggatgaaaatcagcctgtgtctgctcagcagaattcacccacaaagttcctggccgtggaggcaaacgctgtgttatcctctttgcagaccatcccagaatttgcagagactctagaacttattgaatctgatcctgtagcatggagtgacgttaccagttttgatatttctgatgctgctgcttctcctatcaaatccaccccagttaaattaatgagaattcagcacaatgaaggagccatggaatgccaatttaacgtcagtcttgtacttgaagggaaaaaaaacacttgtaatggtggcaacagtgaagctgttcctttaacatccccaaatatagccaagtttagcactccaccagccatcctcagaaagaagagaaaaatgcgagtgggtcattccccaggcagcgaacttagggatggctcattgaacgatggtggtaatatggcgctaaaacatacaccactgaaaacactaccattttctccttcacagtttttcaacacatgtcctggtaatgaacaacttaatatagaaaatccttcatttacatcaacccctatttgtgggcagaaagctctcattacaactcctcttcataaggaaacaactcccaaagatcaaaaggaaaatgtagggtttagaacacctactattagaagatctatactgggtaccacaccaagaactcctactccttttaagaatgcgcttgctgctcaggagaaaaaatatggacctcttaaaattgtgtcccagccacttgctttcttggaagaagatattcgggaagttttaaaagaagaaactggaacagacctattcctcaaagaggaagatgaacctgcttacaaaagctgcaaacaagagaataccgcttctgggaagaaagtcagaaaatcactagtcttagataattgggaaaaagaagaatcaggcactcaactgttgactgaagacatttcagacatgcagtcagaaaatagatttactacatccttattaatgataccattattggaaatacatgacaataggtgcaacttgattcctgaaaaacaagatataaattcaaccaacaaaacatatacacttactaaaaagaaaccaaaccctaacacttccaaagttgtcaaattggaaaagaatcttcagtcaaattgtgaatgggaaacagtggtttatgggaagacagaagaccaacttattatgactgaacaagcaagaagatatctgagtacttacacagctaccagtagtacttcaagagctctcatactgtaattgttattaaaattgatgaaatgccccactcccttactgcagtctctactaaattaggttgcagtgaaatttttctcaattagttgtttttaaagttgtaagatagcccttttaatacagcatcttttttctattctatatagtaggcagaaagctagtaagtcacttaaggggtagatagtttcatagtttattttttaagagatgagatttttaaaaattgtttttaaagaacaagatgggaaaataatagaatgttcatggatttctaaaagtaaattctcatatattttcttcacaagatatatgttgctactctcttgatgctgcagttttgttatagataggtgtatgagtatatatgatttctgaaattagtctatgtatggaaagcacacatgattttatgaagtacttttgcccatgtgctgatttacttaggctaccatttacaaagaaacacattgaaaaggaatttaaaggaaggatagaaagttgcactactaattttttgttttttttttcagaagcagtaaaattaactacagtgttaaatgtatttatttgagcatagtactgaaaacaaaaagcattcaaaaaagagttttttctttattagtaaatagtattttcttaatctcagaggagctgagagttttgttgaatgtattgtacagtatgtaggagcaggagaactttgtaaattggaaagaagtctgtttttataatttatttttatttttaaagcttaaatgtagatatttatacgtatacagggtgcctagaagccaatgttgtttcctgttattacagctaacacagtaaagaataattttgactttaagtatgaaacagtagtaagttatagctgcaaagaatacaatatctatactgtatgtcacatctacctaaatgttgcactatgccctttaaatcatgctggttataaagtagttctaaaaatgtactaaataataatttaatattttctttttaaattatatcgggggtggtcatatacattaatctggtgatttgtatatgtgtttgaaatttttgcattttgtttaaaaaataatatggtaccttggtccctaaaaacagtctgcacttagaagtttatatttactcagtgtttcagaagtggagaacattatcttttatttataaaaatattttgtccttttttaaatgttttgtgtttctctacaggttacaacagttgcttcagttgcctgttttaggtgtttgcacttattttatttcttcttgaaagaatttttatttgcttttgtggtagagattatatgtaattttttttcagtcatataatggtgtgctgtcaacttaaacactgacaggtaaatagaattgtacactgtagtttgaattatttataattgacacactctctccctctccactcctgaagtatgctgctatagaaaatagcagaatcggcttgctgctacgagagaaggaaagagcgaccaccacttgcactgtgtgaaaagataaaaaacaaatgatggcaagttctcaagttaactaaatggaatcaaccattaccaggcaaattcttgcaaataccaaaatactactatgccttataaaacaaaatgaaagcaggttaagattttctgctctgtttgtatgttaatagaaatggaaatactaagtattttaatgcttagctcttgaacagtagacctaaaagggttttaagctatttaaatctacttgctagtttttgcatattttatatatatatatatttatatatatatatagtgagaagtgaagaaaatgtatggtactaagattatgccttattgataaatagataaaccaatttgaatcctcttagcatgtttaagtatgttgattgctttctaattaatgaacttctcacagaaatttcacttagtgaaaccaatgattgtagcaaactcatactggatcatttcagttaccttgaactaatagcacataatggttttttgttgttgttgtttttaatgtagcccttacctggatatacatagtctgcaatcaccaaagtataatatcttgtaaggctatattttttaaagcatattttttcttgagcattaaattatcctaaatggtaatatattgtggataagtctgggcttattggacataatacatatttgggttggtactggttgaatccttcagttaactgctttgttgctttttgcaagattttttatcttaaacatgtcaggcatcttaagtcacctttatactgttttgttcctctgagtttctttcagtatgttatacaaatgccagacataacatgtagcagccatacttgcatggaaactgactacacatacataatactgcattttattgtaaggttttcacattaatacagcaattaccctgactaaattgagttttgtgatatatggaaaacttcattgtaagagaatcttgcatacaatgttgacatattaacatccaaaataaagcatctgtgtaca

SEQ ID NO: 393 - DNA, 5494 bp, Homo sapiens
cccctttgcttttactctgtccaaagttaacatgtcactgaaaaacgagccacgggtaaatacctctgcactgcagaaaattgctgctgacatgagtaatatcatagaaaatctggacacgcgggaactccactttgagggagaggaggtagactacgacgtgtctcccagcgatcccaagatacaagaagtgtatatccctttctctgctatttataacactcaaggatttaaggagcctaatatacagacgtatctctccggctgtccaataaaagcacaagttctggaagtggaacgcttcacatctacaacaagggtaccaagtattaatctttacactattgaattaacacatggggaatttaaatggcaagttaagaggaaattcaagcattttcaagaatttcacagagagctgctcaagtacaaagcctttatccgcatccccattcccactagaagacacacgtttaggaggcaaaacgtcagagaggagcctcgagagatgcccagtttgccccgttcatctgaaaacatgataagagaagaacaattccttggtagaagaaaacaactggaagattacttgacaaagatactaaaaatgcccatgtatagaaactatcatgccacaacagagtttcttgatataagccagctgtctttcatccatgatttgggaccaaagggcatagaaggtatgataatgaaaagatctggaggacacagaataccaggcttgaattgctgtggtcagggaagagcctgctacagatggtcaaaaagatggttaatagtgaaagattcctttttattgtatatgaaaccagacagcggtgccattgccttcgtcctgctggtagacaaagaattcaaaattaaggtggggaagaaggagacagaaacgaaatatggaatccgaattgataatctttcaaggacacttattttaaaatgcaacagctatagacatgctcggtggtggggaggggctatagaagaattcatccagaaacatggcaccaactttctcaaagatcatcgatttgggtcatatgctgctatccaagagaatgctttagctaaatggtatgttaatgccaaaggatattttgaagatgtggcaaatgcaatggaagaggcaaatgaagagatttttatcacagactggtggctgagtccagaaatcttcctgaaacgcccagtggttgagggaaatcgttggaggttggactgcattcttaaacgaaaagcacaacaaggagtgaggatcttcataatgctctacaaagaggtggaactcgctcttggcatcaatagtgaatacaccaagaggactttgatgcgtctacatcccaacataaaggtgatgagacacccggatcatgtgtcatccaccgtctatttgtgggctcaccatgagaagcttgtcatcattgaccaatcggtggcctttgtgggagggattgacctggcctatggaaggtgggacgacaatgagcacagactcacagacgtgggcagtgtgaagcgggtcacttcaggaccgtctctgggttccctcccacctgccgcaatggagtctatggaatccttaagactcaaagataaaaatgagcctgttcaaaacctacccatccagaagagtattgatgatgtggattcaaaactgaaaggaataggaaagccaagaaagttctccaaatttagtctctacaagcagctccacaggcaccacctgcacgacgcagatagcatcagcagcattgacagcacctccagttattttaatcactatagaagtcatcacaatttaatccatggtttaaaaccccacttcaaactctttcacccgtccagtgagtctgagcaaggactcactagacctcatgctgataccgggtccatccgtagtttacagacaggtgtgggagagctgcatggggaaaccagattctggcatggaaaggactactgcaatttcgtcttcaaagactgggttcaacttgataaaccttttgctgatttcattgacaggtactccacgccccggatgccctggcatgacattgcctctgcagtccacgggaaggcggctcgtgatgtggcacgtcacttcatccagcgctggaacttcacaaaaattatgaaatcaaaatatcggtccctttcttatccttttctgcttccaaagtctcaaacaacagcccatgagttgagatatcaagtgcctgggtctgtccatgctaacgtacagttgctccgctctgctgctgattggtctgctggtataaagtaccatgaagagtccatccacgccgcttacgtccatgtgatagagaacagcaggcactatatctatatcgaaaaccagtttttcataagctgtgctgatgacaaagttgtgttcaacaagataggcgatgccattgcccagaggatcctgaaagctcacagggaaaaccagaaataccgggtatatgtcgtgataccacttctgccagggttcgaaggagacatttcaaccggcggaggaaatgctctacaggcaatcatgcacttcaactacagaaccatgtgcagaggagaaaattccatccttggacagttaaaagcagagcttggtaatcagtggataaattacatatcattctgtggtcttagaacacatgcagagctcgaaggaaacctagtaactgagcttatctatgtccacagcaagttgttaattgctgatgataacactgttattattggctctgccaacataaatgaccgcagcatgctgggaaagcgtgacagtgaaatggctgtcattgtgcaagatacagagactgttccttcagtaatggatggaaaagagtaccaagctggccggtttgcccgaggacttcggctacagtgctttagggttgtccttggctatcttgatgacccaagtgaggacattcaggatccagtgagtgacaaattcttcaaggaggtgtgggtttcaacagcagctcgaaatgctacaatttatgacaaggttttccggtgccttcccaatgatgaagtacacaatttaattcagctgagagactttataaacaagcccgtattagctaaggaagatcccattcgagctgaggaggaactgaagaagatccgtggatttttggtgcaattccccttttatttcttgtctgaagaaagcctactgccttctgttgggaccaaagaggccatagtgcccatggaggtttggacttaagagatattcattggcagctcaaagacttccaccctggagaccacactgcacacagtgacttcctggggatgtcatagccaaagccaggcctgacgcattctcgtatccaacccaaggaccttttggaatgactggggagggctgcagtcacattgatgtaaggactgtaaacatcagcaagactttataattccttctgcctaacttgtaaaaagggggctgcattcttgttggtagcatgtactctgttgagtaaaacacatattcaaattccgtataccaaaatccatttcctttgtaacaagaatttaccagtaactgtgatctaggttgccaaaagttgtctgaatctccttattcttctctgatcttcatttatgcagccaatgtctagctggacctgccctcatcttgcagttcatacaggcactgtttgagagattgtttattattagatgttgtaatgctgcttcaagattcttcatggttacatgggatgcccctgctcatctggtcctgaagtagtaacattcacccaaatgaggatatagtcattattccttttcagtcactgtacgaacacggcagactttagcctacacagtagactgtgttaggcacttctggtaacattgacactgtatcttgacaccactaagcaacaggaaggaataaattccaatattgagacagagatttatttcattttgctcccaaaggcactgacaacatgagtccttgtgattaggcccacctgatcaaatgtaaaaacatgcatgggatatttgattacgtaacaaccagctaaaactgagagcacacagccttcggaaacccccaaggtgtcgaggaggatcagatccagataagagaagatgattccttctagtcctgtaaaatttcctgtcatccttagctgctgggttgattgaaatttgatctctacatttcaaaatcaaactagtgaatacagtttgtctttcaagagaatcagaggcatcgtaactcctaccaagttagtaagtatgagtctaaccttgtttgacattcaggtcttctgctacattatcttctttgagaaaaattaattgattataaaatatgtgctacttcacttacattattaaatatgtattaacgcctctcaccagggcttccagtgaagttacaatgccctagtctgtgaattagtctggaaacgtgtttttccttttcggatgttagagtaccctttgataaactaaattttactaagctgaacaactctgacagtctaaagagctaatgtgggttaccaaaaggcctgtacctgtaaaacaaaatgcaggtgtaatgattatacatgtatatggattacctggacatactctcatttgggttgttcttcaaagaagcaagcagccgatccctgttttcataaagctaatacttcagttggaaaaattaaacaggagcacaaagtcagggataggggttagcagaagagagaaatagtgtcacatcaagggcaggatctcatagctagggaacatttcacaaataaggtgagattttgtaaccaataataaaaatgaatgtttttataagtaaataacttatttttcatatggctaaagatggtaaaatgacttcattctatagccattgtaaataagaatttgctattgatgaaagaagttcagattggcatttgaagtattgagtgtatgggatctctaaggatttcttagattttatatttaaatattttttaaaccttagaggagtcaacaaactggctcttgattttcagcaccctactctcatgaaaaaagcctgaaaggaccctttcccttataagtaatttaatccaatttctccccattttatagatgaggaaactgaggctcagatcagatgagaactcacttaaatccactcaatgtgtagatggtagagctgggactagcaacattgctgcagcccattgttggcctctctcttcactttatcattgcccaagaatgaggatatgcagtaaacagaattcaggcaagatacctctaagctgttttgaaccctctgatattttgtatttatgtgtttgtctgtctccccctactagaatgtaagctccatggggcagggacttcactgtattttgttcatagtgtatccccagagcctggaccagtgcttggcacataggagatggcaataaatgcttgtagaattaataaacaaaaaaaaaaaaaaaaa

SEQ ID NO: 394 - DNA, 4900 bp, Homo sapiens
atggaggagttgtcctctggccaagctggtcaggactacctggtgggcactggtggtggaaggcagtttgcagttgatagtttccacttgagcggcacagtgacagaacctgcaatacaatcggagccagaaactgtttgcaacgtggccatcagctttgatcgttgcaagattacctcagtgacctgcagctgtggaaacaaggacatattttattgtgcccatgttgtggcactgtctttataccgcatccgcaagccagatcaggtcaaactgcatcttcctatttcagagactctctttcaaatgaatagagaccaactgcaaaagtttgtacagtatttgatcacagtgcaccacacagaagttttgccaactgctcaaaaattagcagatgaaattctttcccaaaattcagaaatcaaccaagttcatggtgctcctgatccaacagcaggtgctagtatagatgatgaaaactgctggcacttagatgaagagcaggttcaagaacaggttaaactgttcctttcccagggcgggtaccacggatcagggaagcagcttaatttgctctttgcaaaggtgcgggagatgttaaagatgagggactccaatggggcccgcatgttgaccttgataacagagcaattcatggctgaccctcgcctgtcactttggcggcaacaaggcactgcaatgactgacaaatacaggcagctctgggatgagctgggtgctctgtggatgtgtatagttttaaacccccactgcaagttggagcaaaaggccagttggctaaaacagctgaagaaatggaatagtgttgatgtctgtccatgggaagatggaaatcatggcagtgaattacccaacttaaccaatgctctgcctcagggtgcaaatgccaaccaagattcatcgaacaggccacatcggacagtgttcacccgagccatcgaggcatgcgatctccactggcaggatagccacttgcagcacattatcagcagtgacctatacaccaactactgttaccatgacgacactgaaaactccctcttcgactcccgcgggtggcccctctggcatgaacatgttcctacagcctgtgcaagagtggacgcattacgttctcatgggtaccccagagaagcactgagactagcaatagctattgttaatacattaagacgacagcagcagaaacagttggaaatgttccgaacccaaaaaaaagagctaccccataaaaacataacctcgataaccaatctggagggctgggttggacatcccctggaccctgtgggcactctcttcagtagccttatggaagcctgccgcattgatgatgagaacctctctgggttctcagattttacagagaatatgggacagtgcaagtctctggaataccagcatctacctgcacacaaattcttagaagaaggggaatcctatttaacgctggctgtggaagtagccctgatagggctaggacagcagcgtatcatgcctgatgggctgtacacacaagagaaagtttgccggaatgaggagcagctcatttctaagcttcaggaaattgaattggatgacacactggtgaaaatttttcgcaagcaagcagtcttcctattagaagccggaccatatagtggtttaggtgaaataatccatcgggagagcgttccaatgcacacatttgccaagtatctcttcacctctctcctacctcacgatgctgaattggcatacaaaattgcactgagagcaatgcggttactagtattggaatctactgctccatcaggagacctcacccgcccacaccacattgcatcagttgttcccaaccgctaccctcgctggttcactctaagccacattgagtcccagcagtgtgagctggcatccaccatgctaactgcagccaaaggcgatgttcggaggctggaaacagtattagaatccatccagaaaaacattcactcctcatcacacatcttcaagcttgcccaagatgcatttaaaatagcaactctcatggacagtttgccagacatcactcttttgaaagtgtctctggagctgggcctgcaggttatgcgaatgacactgtcaaccttaaattggcgacggcgggagatggtgaggtggctggtaacgtgtgctactgaagtcggggtttatgccctggacagcatcatgcagacctggtttacactctttactcccaccgaggccacaagtatagttgcaactaccgtgatgtccaacagcaccatcgtccgcctccacctggactgccaccagcaggaaaagctggccagcagcgcccggacacttgcactgcagtgtgccatgaaggatccacagaactgtgccctctctgcgctaaccctttgtgaaaaggatcacatagcttttgagacggcgtaccaaattgttctcgacgctgctacgactggcatgagctatacacagctctttacaatagcacggtacatggagcaccgcgggtaccccatgagggcctacaagctggccaccctggccatgacccatctcaacctgagctacaatcaggacacacaccctgccattaatgatgttttgtgggcctgtgcgcttagccactcccttggtaaaaatgagcttgcagctataatacctctggtggtcaagagtgtcaagtgtgcaacggtactgtcagacattttgcgcagatgcactctgaccactcctggcatggtgggacttcatgggaggaggaactctggtaagctcatgtcactggacaaagcccccttgaggcaactcttggatgccacgatcggggcctacatcaacacaacgcactcacggctcacacacatcagtcctcggcactatagtgagtttatagagttcctcagcaaagcccgagagaccttcttaatggcgcatgatggacacattcagtttacacagtttattgacaacctgaaacaaatctacaaaggcaaaaagaaactgatgatgttggttcgggagaggtttggttgatagatcttgtatgaatggggtggggggtggggatgggagggatggtttgtttttacttgagcctgcctttgtaccctttttaacttaaagaacagagccacaccggtattatatgtgtatagttatattgcgtttgcagactaaattgtcatgttgtgaaagtttgtgtgttttttattttttccctatttctttctttcctttattttattattttttttaattttttttttctggttttgtatgagagagaggttaaaaaggtttggtttacactgagtatatgttgtcaagtggcaaaagtccacatagctctcctgttttctgtatacgttcacagcctcaaaaaaaataattgaaatggctttaaaaaccaaacaaaacacctccatcctgtgataagtacctcgaatggattcagctttactcctttgtaactcatctttacattttcagcatatttaaacaaaccaacaaaatgaaatactaatagtaaaaaggctgacccatgtggctttgcagtgctgttcgtccagaagcatggcacacgatgcttgtgcatgtggaaacttagcgactgtcaacatacattctcagggatttatccaaaaaaattaaaaaaagaatgagagcatttattgtactgtatatatattatagtatatgtctgaatattgaaaatataacattaactaatttataaaaaatattctatgtaatgcaaaatacttgaagctgcagtagcttggttttaaacaaaaacaaaaaaaaaactgagagaaaacctatcagaaggactaaaagtacgccttgcttcagggttggctcaggtggtgaacttcatgctgggcatctatgcagagccaccttttggattgcatggttggactgagatctattgggagaaattatatatgtatatatatttatacaacttatgtatacatatatatatgtatacacacagacacacacacacaccaccaacaaccaccactacaccacacatgcttataacaggcactagaataaagagggacaacaaaatacacagccagagcagcaagccttagcattaagaatatacaatatgccggaattggggttcgtgcctcctagcctaggaaacttaaaagaaatatccttttgacacaaaacacaaaatgttttccaaaacaattgacataatgatacattacgcctttgcagtgagctaataataagctaacctttgtgcacaaataacattatatatattatatatctattctgcataggtattttgactttgtgcaggacagaaagttgtgtaggtatgactgttctacttttcagttttctttttttttaatatattttattttctctagaaattactcaaacaaaagcagccttctatcttgccttgtcttaatgctttaaaataaccaaactggagatctaactaccaaactgttcattatattattaaataccaactttggttacagtatagtgtctttactttagctgatggttctgtaaccttgtgctttttaaagcaatttttatgttttggtgcaaaagttgtccagtgtctcttgttcccttcactagagaacatgcttagaggtatgtttgtaggtatttttgtttagaagaactatttcatgcgctccattttatttattataataggtaaaaagaaaaaaaaaggttgtaattcatcacccatgtaaacatgctcatgaagttgaaagtaattaagatttgatacactgatatcaatttatttatgtaactaaatcactgttttataaacttgttaatgatcaacaatttttgttttgattaaaattagttttttgaa

SEQ ID NO: 395 - DNA, 3030 bp, Homo sapiens
agccatatgggggatacgccagcaacagacgccggccgccaagatctgcatccctaggccacgctaagaccctggggaagagcgcaggagcccgggagaagggctggaaggaggggactggacgtgcggagaattcccccctaaaaggcagaagcccccgcccccaccctcgagctccgctcgggcagagcgcctgcctgcctgccgctgctgcgggcgcccacctcgcccagccatgccaggcccggccaccgacgcggggaagatccctttctgcgacgccaaggaagaaatccgtgccgggctcgaaagctctgagggcggcggcggcccggagaggccaggcgcgcgcgggcagcggcagaacatcgtctggaggaatgtcgtcctgatgagcttgctccacttgggggccgtgtactccctggtgctcatccccaaagccaagccactcactctgctctgggcctacttctgcttcctcctggccgctctgggtgtgacagctggtgcccatcgcttgtggagccacaggtcctaccgggccaagctgcctctgaggatatttctggctgtcgccaactccatggctttccagaatgacatcttcgagcggtccagggaccaccgagcccaccacaagtactcagagacggatgctgacccccacaatgcccgccggggcttcttcttctcccatattgggtggctgtttgttcgcaagcatcgagatgttattgagaaggggagaaagcttgacgtcactgacctgcttgctgatcctgtggtccggatccagagaaagtactataagatctccgtggtgctcatgtgctttgtggtccccacgctggtgccctggtacatctggggagagagtctgtggaattcctacttcttggcctctattctccgctataccatctcactcaacatcagctggctggtcaacagcgccgcccacatgtatggaaaccggccctatgacaagcacatcagccctcggcagaacccactcgtcgctctgggtgccattggtgaaggcttccataattaccatcacacctttccctttgactactctgcgagtgaatttggcttaaattttaacccaaccacctggttcattgatttcatgtgctggctggggctggccactgaccgcaaacgggcaaccaagccgatgatcgaggcccggaaggccaggactggagacagcagtgcttgaacttggaacagccatcccacatgtctgccgttgcaacctcggttcatggctttggttacaatagctctcttgtacattggatcgtgggagggggcagagggtggggaaggaacgagtcaatgtggtttgggaatgtttttgtttatctcaaaataatgttgaaatacaattatcaatgaaaaaactttcgtttttttttttgtttgttttgtttttgagacagagtctcactctgtcacccaggctggagtgcagtggcgcagtctcggctcactgcagcctccacctacctggttcaagcaattctcctgcctcagcctcctgagtagctgagattacaggagcctgccaccacacccagctaatttttttgtatktttagtagagacagggtttcatcatgttggccagactggcctcgaattcctgacctcaggcaatccacccgcctcggcctcccaaagagctgggattacaggcgtgagccaccgcaccctgccgaaaaaaacttttttttttttgagacggaggctcgctctgtcccccaggctggagtgcagtggcgagatctcagctcactgcaagctccgcctcccgggttcacgccattctcctgcctcagcctcccgagtagctgggagccagcgcgcccagcctaaaaaacttttcaagtcaatattactacgatttaacattagagtgtggacatgtgatttaatcgctatagctaaaatacgtcaaatatacgttgtcatgtgcttgaacatgatgctaaccctgacaggatgaaggaaagtaatattctttcagtgtagttcaggagagcatttgttttcttttctaccaattaacccatcattgcttttaaacaaccatctgaaggagcagagaggcagggtagaagacagaagggggatctatgtggtaactaaagaatgtttctgttttgttaattattgtgtgtgtgtggttttattgtttgcttaagagaatcaaaaactgaaaaaaatgagaatacaggaaatggctcttgtttatttttttgctgtgtttacagcttgttaatgctctactgtctttgtttcaagagagatttgttcactgcccagctcgttttgtgtcctgagccctatggccagcccaccttataaatcatgcctgtttagatgtttgattttgttctgtttgctattgttatcttaaaggtgtataactctgacatgccagacatcaaattaagctcaaattaagctctcgtttaaatgtttaagcacctaatttatattctaattgatcccagccactgatgcatgtactttagctacttctgctaaataagcatattaattttccacatcagaccatcagatcttgagaaccaacagttatctagaattccgtgtctactaatgtttcacctgcatgcagccttcattaattttgtagcaaaatataaagtgatcattatgtagcttctggattaaaaaaatttgtgtgtgaagttgctttgtaaagtgcatgtggaattaatgggacagtgtgccctttgtgttagatgttagagcaaaagaaagggcttatagtgttagtattggagcactttgaagatagatattttcagaaaagatgtaggatttaaaagttaaattttaaattttagaaaaagatatgatggcaattggaaatagtcacaatgaagttcttcatccagtaggtgtttaacagtgttattttgccactggtaatgtgtaaactgtgagtgatttacaataaatgattatgaattcaaaaaaaaaaaaaaa

SEQ ID NO: 396 - DNA, 2021 bp, Homo sapiens
agccatatgggggatacgccagcaacagacgccggccgccaagatctgcatccctaggccacgctaagaccctggggaagagcgcaggagcccgggagaagggctggaaggaggggactggacgtgcggagaattcccccctaaaaggcagaagcccccgcccccaccctcgagctccgctcgggcagagcgcctgcctgcctgccgctgctgcgggcgcccacctcgcccagccatgccaggcccggccaccgacgcggggaagatccctttctgcgacgccaaggaagaaatccgtgccgggctcgaaagctctgagggcggcggcggcccggagaggccaggcgcgcgcgggcagcggcagaacatcgtctggaggaatgtcgtcctgatgagcttgctccacttgggggccgtgtactccctggtgctcatccccaaagccaagccactcactctgctctgggcctacttctgcctcctcctggccgctctgggtgtgacagctggtgcccatcgcttgtggagccacaggtcctaccgggccaagctgcctctgaggatatttctggctgtcgccaactccatggctttccagaatgacatcttcgagcggtccagggaccaccgagcccaccacaagtactcagagacggatgctgacccccacaatgcccgccggggcttcttcttctcccatattgggtggctgtttgttcgcaagcatcgagatgttattgagaaggggagaaagcttgacgtcactgacctgcttgctgatcctgtggtccggatccagagaaatacacagcacatccagaaagaaggaagagctctcaatcaagaggcagcgtgtgagatgcttcgtgagtggcatcaagggcatatattgaaagtcacccttcccggattacacattttagctttgttacatactcattgtaaccactccgaaaagtgctgcttgatgctgcgtgctctttctgtgtccctggaggtattctgaaggtcagaagagagatatacaacagcgaggcttggtgataacgtatagaataacagacggggactccacacccaggccttttttaacggtgtgaagcatagacagagctgcagtctgtgctaacattaggttatttattgattcaatcagttgacacaaggaggcagctacggggaggtaaaatatggtcctaaaatcaaaaagatttcagttttgtcattctgtctctgagattctatttccacatctagagcagggtaataatgatacctaccttacaaaattattgggagaatacattagttaatatatgtgaaagtatggaggagatgtgcaataaatatttgtgttattaactacacatacagcactctataggagatattccatttataaaaactttaggttctaaaaacctgtacacgttgattatttttgtaagtcaaaagtgattaagaggagtttaagctatcatttccagatgtatttctataaataaaaacataagtatattcagttgatttggggtggagagttccatagatgtctgttaggtccgcttggtccagagctgagttcaagtcctgaatatccttgttaattttctgtcttgttgatctgtctaatattgacagtggggtattaaagtctcccactattattatatgggagtctaagtctccttgtaggtctctaagaacttgctttatgaatctgggtgctcctgtattaggtgcatacatatttaggatagttagctcttcttgctgcattgatcccattaccattatataatgcccttctttgtcttttttgatctttgttggtttaaagtctgttttattagagactaggattgcaacccctgctatttttttttttttttttgcttgataaatattcctgtatccctttattttgagcctatatgtgtctttgcacgtgaggtgggtctcctgaatacagcacaccgatgggttttgactctaaaaaaaaaaaaaaaaaaaaaaaaaaa

SEQ ID NO: 397 - DNA, 4877 bp, Homo sapiens; identical to SEQ ID NO: 279

SEQ ID NO: 398 - DNA, 4707 bp, Homo sapiens
gcgccatggagcagtggcgacagtgcggccgctggctcatcgattgcaaggtcctgccgcccaaccaccgggtggtgtggccctcggccgtggtcttcgacctggcgcaggcgctgcgcgacggggtccttctgtgccagctgctgcacaacctctcccccggctccatcgacctcaaggacatcaacttccggccgcagatgtcccagtttctgtgtttgaagaacatacgcaccttcctgaaagtctgccacgataaatttggattaaggaacagcgagctgtttgacccctttgacctcttcgatgtgcgagactttggaaaggtcatctccgcggtgtcgaggctctccctgcacagcatcgcgcagaacaaagggatcaggccttttccctcagaggagaccacagagaatgacgatgacgtctaccgcagcctggaggagctggccgacgagcatgacctgggggaggacatctacgactgcgtcccgtgtgaggatggaggggacgacatctacgaggacatcatcaaggtggaggtgcagcagcccatgaaaatgggcatgactgaagatgacaagaggaactgctgcctgctggagatccaggagaccgaggccaagtactaccgcaccctggaggacattgagaagaactacatgagccccctgcggctggtgctgagcccggcggacatggcagctgtcttcattaacctggaggacctgatcaaggtgcatcacagcttcctgagggccatcgacgtgtccgtgatggtggggggcagcacgctggccaaggtcttcctcgatttcaaggaaaggcttctgatctacggggagtactgcagccacatggagcacgcccagaacacactgaaccagctcctggccagccgggaggacttcaggcagaaagtcgaggagtgcacactgaaggtccaggatggaaaatttaagctgcaagacctgctggtggtccccatgcagagggtgctcaaataccacctgctcttgaaggagcttctgagccattctgcggaacggcctgagaggcagcagctcaaagaagcactggaagccatgcaggacttggcgatgtacatcaatgaagttaaacgggacaaggagaccttgaggaaaatcagcgaatttcagagttctatagaaaatttgcaagtgaaactggaggaatttggaagaccaaagattgacggggaactgaaagtccggtccatagtcaaccacaccaagcaggacaggtacttgttcctgtttgacaaggtggtcatcgtctgcaagcggaagggctacagctacgagctcaaggagatcatcgagctgctgttccacaagatgaccgacgaccccatgaacaacaaggacgtcaagaagtggtcctacggcttctacctaattcaccttcaaggaaagcagggcttccagtttttctgcaaaacagaagatatgaagaggaagtggatggagcagtttgagatggccatgtcaaacatcaagccagacaaagccaatgccaaccaccacagtttccagatgtacacgtttgacaagaccaccaactgcaaagcctgcaaaatgttcctcaggggcaccttctaccagggatacatgtgtaccaagtgtggcgtcggggcacacaaggagtgcctggaagtgatacctccctgcaagttcacttctcctgcagatctggacgcctccggagcgggaccaggtcccaagatggtggccatgcagaattaccatggcaacccagcccctcccgggaagcctgtgctgaccttccagacgggcgacgtgcttgagctgctgaggggcgaccctgagtctccgtggtgggagggtcgtctggtacaaaccaggaagtcagggtatttccccagctcatctgtgaagccctgccctgtggatggaaggccgcccatcagccggccgccatcccgggagatcgactacactgcatacccctggtttgcaggtaacatggagaggcagcagacggacaacctgctcaagtcccacgccagcgggacctacctgatcagggagcggcctgccgaggctgagcgctttgcaataagcatcaagttcaatgatgaggtgaagcacatcaaggtggtggagaaggacaactggatccacatcacagaggccaagaaattcgacagcctcctggagttggtggagtactaccagtgccactcactgaaggagagcttcaagcagctggacaccacactcaagtacccctacaagtcccgggaacgttcggcctccagggcctccagccggtccccagtgttcacgccccgcgtcatcggcacagctgtggccaggtataactttgccgcccgagatatgagggagctttcgctgcgggagggtgacgtggtgaggatctacagccgcatcggcggagaccagggctggtggaagggcgagaccaacggacggattggctggtttccttcaacgtacgtagaagaggagggcatccagtgacggcaggaacgtggacaagactcgcagattttcttgggagagtcactccagccctgaagtctgtctctagctcctctgtgactcagaggggaaataccaacctcccagtcttccactgcccacagggatagggagggtgttgagaatcctaaactcgaaccgtttcactgtcagcctgccctcggcgacccatcactgggtatgctattgtacatagaggaaacctgggctagccccacccagagcgcagaggagggggcaccgacagcgctgcgagccaggctctgggtagtggctgaggccagaggcccatcgcctgcccctgtccaactgagatggccttcaggagcctaggtttgaacagcagatgctgtcccaggaagggctagggacatcggaggggacctgcccccacaccctctgctcagcccctggactcagccttgcctgtcttttcctgctgctcccagggggaggtgtcagacctcgggaggcagacgggaccagagccaggctgttcactgtgggcccacttgccccactgtgctagggcgcgggaggagagagcactgtggtcgccctctgcagccactctggctcccaagacttccctgactcccccactcccctccttgccaggggcacacccggaccccacacggcaggcccctctcttgggaggggcctttggaatgatgaaattccaaccctgctgcccggtcagcggtaccgtttcctgccctctctctgagaggccctttctggagtcctgggaaggtgtctgcctggccgcgctgccagatcagtacatcttttgtaaaaaccctgaaatgggcagggaagaaaacagggatttcccctctctagatccctgccaggtccctctccaggaggcccctctgctctcctgaagggtggtccctgagggtctgcccagccttggcacgagaggttggttccagcccctggcagggcttccttccaagggcccctgcagcctacaaactgggcctcgggcgactcaaaataagtgctcttgggggtggctctaccccattacctcccccagccacaactcctggccttcgacttctggctgggttagccagaccctggtttctctaccctgatgttgcatgagacctggtaacagtgtctccctcccagctccttgccaaagcctctgttgagacctgggcttcttgtagccccttctccctctggccagctgcacagcctgtgggaggtgcccggcccaggctgggtgtgggggaagctggtccctgctgtgggtggcgctggggacctaggggctccttctgaggttggccttgtggcctctgggctgtatgcctctggggtgtagggaagaggcgggaggagtcatggggatggggagcggcagggggagagaggggccctcgacaaaggcttgggaaatgaggggaggtggaggcagggcaggggaagcgaagagtcagccttggagagagcaccctggggcctccgtgtcggggtacacccagcactttgcgacctgcggcccagcaggcgcggaggatggcggggaggaagccagcagcccctgtgtttactgtcgtcagaaaggtcttgtgttttggttttggggtttttgttttgtttgtgttttgtttggcttgtttgttttttaaggggaaaaaagtttgtaattatttcatccaaatctcccgttatatatctgtgaataataagagattttataatagcaagaaaatgatgtatattttagtttgttgacaaataagtcatcatgatcacgaaggacactgagaaaaaataatttagaaccctggtttttgtgaatttttttgttttgtgtttctttgttttgagatttgtgtttggtttggtttttgcactgcactaaggcaggagggttggagggctgggtgcagcctgggagtccgatggttttcagcaggagacggggtgtcccctgcagggggctaaactgcaggggcctgagattagctgtgaacatgtgggagcccgatgcatgtgggtcagggatctgggggcccccccagctggcgggaaccccaaatggacacaaactgtacatttgccaatgggtttttttcagaccatggtttttacttgcaaataaacctgagttcttttctgcaaaaaaaaaaaaaaa

SEQ ID NO: 399 - DNA, 1402 bp, Homo sapiens
ggggacgaagggaagctccagcgtgtggccccggcgagtgcggataaaagccgccccgccgggctcgggcttcattctgagccgagcccggtgccaagcgcagctagctcagcaggcggcagcggcggcctgagcttcagggcagccagctccctcccggtctcgccttccctcgcggtcagcatgaaagccttcagtcccgtgaggtccgttaggaaaaacagcctgtcggaccacagcctgggcatctcccggagcaaaacccctgtggacgacccgatgagcctgctatacaacatgaacgactgctactccaagctcaaggagctggtgcccagcatcccccagaacaagaaggtgagcaagatggaaatcctgcagcacgtcatcgactacatcttggacctgcagatcgccctggactcgcatcccactattgtcagcctgcatcaccagagacccgggcagaaccaggcgtccaggacgccgctgaccaccctcaacacggatatcagcatcctgtccttgcaggcttctgaattcccttctgagttaatgtcaaatgacagcaaagcactgtgtggctgaataagcggtgttcatgatttcttttattctttgcacaacaacaacaacaacaaattcacggaatcttttaagtgctgaacttatttttcaaccatttcacaaggaggacaagttgaatggacctttttaaaaagaaaaaaaaaatggaaggaaaactaagaatgatcatcttcccagggtgttctcttacttggactgtgatattcgttatttatgaaaaagacttttaaatgccctttctgcagttggaaggttttctttatatactattcccaccatggggagcgaaaacgttaaaatcacaaggaattgcccaatctaagcagactttgccttttttcaaaggtggagcgtgaataccagaaggatccagtattcagtcacttaaatgaagtcttttggtcagaaattacctttttgacacaagcctactgaatgctgtgtatatatttatatataaatatatctatttgagtgaaaccttgtgaactctttaattagagttttcttgtatagtggcagagatgtctatttctgcattcaaaagtgtaatgatgtacttattcatgctaaactttttataaaagtttagttgtaaacttaacccttttatacaaaataaatcaagtgtgtttattgaatggtgattgcctgctttatttcagaggaccagtgctttgatttttattatgctatgttataactgaacccaaataaatacaagttcaaatttatgtagactgtataagattataataaaacatgtctgaagtcaaaaaaaaaaaaaaaaaaaaaaaaaaaaaaaaaaaaaaaa

SEQ ID NO: 400 - DNA, 2362 bp, Homo sapiens
agcgggtttttgacggctggaggccaccgagaagaaggaggaagcaggggtggcggctgctgcggcggttgcggcgggggccggggtgggcgccgcggtccgggccgggcagtgaggcgcgggcggccgggccggtgggctgggcggcgggcccggcggccgccctcgcacccttgcccgcgcctggcggcccgatgtggctgcagcagcggctcaaggggctgccgggactgctgtcgagcagctgggcccgccgcctcctctgcctgcttggcctcctgctgctgcttctgtggtttggggggtccggcgcgcggcgggcggcgggcggcctgcacctgctgccctggtcccgcggtgagccgggcgccgccgagccgtctgcctgcctggaggcggccacccgcgcctggcgcggcctgcgggagcgcggtgaggtggtaccgctgggtcctggagtgccggccctggtggccaacggcttcctggcactggacgtggctgccaatcggctgtgggtgactcccggggagcgggagcccgccgtggcgccggactttgtgcccttcgtgcagctgcgcccgctgagcgcgctggctgaagctggagaggcggtgctgctgctgcgggaggggcttctgcgccgcgtgcgttgcctgcagctggggtccccaggtcctggccccgtggccgccggccccgggcccgcctccgtctctggccttgccgcggggtccggccgcgactgcgtgctgctgcaagaggactttctggcgcacaggggccgaccccacgtctacctgcagcgcatccagctcaacaaccccacggagcgcgtggccgcgctgcagactgtggggcccactgccggcccagcccccaaggccttcaccagtaccctggagaaggtcggagaccatcagttcctcctctactcaggccggtccccgcctacgcccactgggttggtgcacctggtggtggtggccgccaagaagctggtgaaccgcctccaagtggctcccaagacgcagctggatgagacggtgctgtgggtggtgcacgtctctggccccattaacccccaggtgctcaaaagcaaagcagccaaggagctcaaggcgctgcaggacttggcacggaaggaaatgctggagctcttggacatgccagcggcggagctgcttcaagaccaccagctcctctgggctcagctcttcagcccaggagtggaaatgaagaagatcactgacacccacacgccgtctggcctcaccgtgaacctgacgctctattacatgctctcctgctcgccagccccactgctcagcccctccctgagccacagggagcgagaccagatggagtcgacgctcaactatgaagatcactgcttcagcgggcacgccaccatgcacgccgagaacctgtggccggggcggctgtcctccgtccagcagatcctgcagctctctgacctgtggaggctgaccctccagaagcgtggctgcaaggggctggtgaaggtgggtgccccaggcatcctgcaggggatggtgctcagctttggggggctgcagttcacagagaaccacctccagttccaggccgaccccgacgtgctgcacaacagctatgcattgcatggcatccgctacaagaacgaccatatcaacctggccgtgctggcggatgccgagggcaagccctacctacacgtgtccgtggagtcccgtggccagcctgtcaagatctatgcctgcaaggcaggctgcctggacgagccagtggagctgacctcggcgcccacgggccacaccttctcggtcatggtgacacagcccatcacgccactgctctacatctccaccgacctcacacacctgcaggacctgcggcacacgctgcacctcaaggccatcctggcccatgatgagcacatggcccagcaggaccccgggctgcccttcctcttctggttcagcgtggcctccctaatcaccctcttccacctcttcctcttcaagctcatctacaacgagtactgtgggcctggagccaagcccctcttcaggagtaaggaagatcccagtgtctgagtgaactaacagtcctgctttcagccaccatttgcacaagacacccagcactgaaagtcccgctgccaggagcaagggatcctttggaagcacccgccctttgtgccttgttgggggaaaccggtgacgcagaagtgagtgtggatacaccagagtttgcattggaaggaatgagtgtcacgtggggagggaaggggccagtggaccttttgtaagctttccactcaataaaatgaacctgtatggcaaaaaaaaaaaaaaaa

SEQ ID NO: 401 - DNA, 6401 bp, Homo sapiens
caaggcggccggcggcgaccatggcagcgggccggcggcggccgtagtggcccaggcctgggcttcagcctcccggggccccagagggcggggcggtccgggccgcggcggtggcggcgccacttccctgctcccgcccgaggactcctgcgggcactcgctgaggaccagcggaccggcggcgcgaatctgactgaggggcggggacgccgtctgttccccgccgctcccggcagggccgggccgggctgggccgggctgggccgggcgggcccctgggagcagcccccaggcgggggaccgccttggagacccgaagccggagctagaggcaggcggtgggcccgggtggagtcccggccggagctggtggttcgggggcggtgctaggccccgaggctgcgggacctgagcgcgaggagcctgagtgcgggtccagcggtggcggcatgagccggcccccgccgacggggaaaatgcccggcgcccccgagaccgcgccgggggacggggcaggcgcgagccgccagaggaagctggaggcgctgatccgagaccctcgctcccccatcaacgtggagagcttgctggatggcttaaattccttggtccttgatttagattttcctgctttgaggaaaaacaagaacatagataatttcttaaatagatatgagaaaattgtgaaaaaaatcagaggtctacagatgaaggcagaagactatgatgttgtaaaagttattggaagaggtgcttttggtgaagtgcagttggttcgtcacaaggcatcgcagaaggtttatgctatgaagcttcttagtaagtttgaaatgataaaaagatcagattctgcctttttttgggaagaaagagatattatggcctttgccaatagcccctgggtggttcagcttttttatgcctttcaagatgataggtatctgtacatggtaatggagtacatgcctggtggagaccttgtaaaccttatgagtaattatgatgtgcctgaaaaatgggccaaattttacactgctgaagttgttcttgctctggatgcaatacactccatgggtttaatacacagagatgtgaagcctgacaacatgctcttggataaacatggacatctaaaattagcagattttggcacgtgtatgaagatggatgaaacaggcatggtacattgtgatacagcagttggaacaccggattatatatcacctgaggttctgaaatcacaagggggtgatggtttctatgggcgagaatgtgattggtggtctgtaggtgttttcctttatgagatgctagtgggggatactccattttatgcggattcacttgtaggaacatatagcaaaattatggatcataagaattcactgtgtttccctgaagatgcagaaatttccaaacatgcaaagaatctcatctgtgctttcttaacagatagggaggtacgacttgggagaaatggggtggaagaaatcagacagcatcctttctttaagaatgatcagtggcattgggataacataagagaaacggcagctcctgtagtacctgaactcagcagtgacatagacagcagcaatttcgatgacattgaagatgacaaaggagatgtagaaaccttcccaattcctaaagcttttgttggaaatcagctgcctttcatcggatttacctactatagagaaaatttattattaagtgactctccatcttgtagagaaactgattccatacaatcaaggaaaaatgaagaaagtcaagagattcagaaaaaactgtatacattagaagaacatcttagcaatgagatgcaagccaaagaggaactggaacagaagtgcaaatctgttaatactcgcctagaaaaaacagcaaaggagctagaagaggagattaccttacggaaaagtgtggaatcagcattaagacagttagaaagagaaaaggcgcttcttcagcacaaaaatgcagaatatcagaggaaagctgatcatgaagcagacaaaaaacgaaatttggaaaatgatgttaacagcttaaaagatcaacttgaagatttgaaaaaaagaaatcaaaactctcaaatatccactgagaaagtgaatcaactccagagacaactggatgaaaccaatgctttactgcgaacagagtctgatactgcagcccggttaaggaaaacccaggcagaaagttcaaaacagattcagcagctggaatctaacaatagagatctacaagataaaaactgcctgctggagactgccaagttaaaacttgaaaaggaatttatcaatcttcagtcagctctagaatctgaaaggagggatcgaacccatggatcagagataattaatgatttacaaggtagaatatgtggcctagaagaagatttaaagaacggcaaaatcttactagcgaaagtagaactggagaagagacaacttcaggagagatttactgatttggaaaaggaaaaaagcaacatggaaatagatatgacataccaactaaaagttatacagcagagcctagaacaagaagaagctgaacataaggccacaaaggcacgactagcagataaaaataagatctatgagtccatcgaagaagccaaatcagaagccatgaaagaaatggagaagaagctcttggaggaaagaactttaaaacagaaagtggagaacctattgctagaagctgagaaaagatgttctctattagactgtgacctcaaacagtcacagcagaaaataaatgagctccttaaacagaaagatgtgctaaatgaggatgttagaaacctgacattaaaaatagagcaagaaactcagaagcgctgccttacacaaaatgacctgaagatgcaaacacaacaggttaacacactaaaaatgtcagaaaagcagttaaagcaagaaaataaccatctcatggaaatgaaaatgaacttggaaaaacaaaatgctgaacttcgaaaagaacgtcaggatgcagatgggcaaatgaaagagctccaggatcagctcgaagcagaacagtatttctcaaccctttataaaacacaagttagggagcttaaagaagaatgtgaagaaaagaccaaacttggtaaagaattgcagcagaagaaacaggaattacaggatgaacgggactctttggctgcccaactggagatcaccttgaccaaagcagattctgagcaactggctcgttcaattgctgaagaacaatattctgatttggaaaaagagaagatcatgaaagagctggagatcaaagagatgatggctagacacaaacaggaacttacggaaaaagatgctacaattgcttctcttgaggaaactaataggacactaactagtgatgttgccaatcttgcaaatgagaaagaagaattaaataacaaattgaaagatgttcaagagcaactgtcaagattgaaagatgaagaaataagcgcagcagctattaaagcacagtttgagaagcagctattaacagaaagaacactcaaaactcaagctgtgaataagttggctgagatcatgaatcgaaaagaacctgtcaagcgtggtaatgacacagatgtgcggagaaaagagaaggagaatagaaagctacatatggagcttaaatctgaacgtgagaaattgacccagcagatgatcaagtatcagaaagaactgaatgaaatgcaggcacaaatagctgaagagagccagattcgaattgaactgcagatgacattggacagtaaagacagtgacattgagcagctgcggtcacaactccaagccttgcatattggtctggatagttccagtataggcagtggaccaggggatgctgaggcagatgatgggtttccagaatcaagattagaaggatggctttcattgcctgtacgaaacaacactaagaaatttggatgggttaaaaagtatgtgattgtaagcagtaagaagattcttttctatgacagtgaacaagataaagaacaatccaatccttacatggttttagatatagacaagttatttcatgtccgaccagttacacagacagatgtgtatagagcagatgctaaagaaattccaaggatattccagattctgtatgccaatgaaggagaaagtaagaaggaacaagaatttccagtggagccagttggagaaaaatctaattatatttgccacaagggacatgagtttattcctactctttatcatttcccaaccaactgtgaggcttgtatgaagcccctgtggcacatgtttaagcctcctcctgctttggagtgccgccgttgccatattaagtgtcataaagatcatatggacaaaaaggaggagattatagcaccttgcaaagtatattatgatatttcaacggcaaagaatctgttattactagcaaattctacagaagagcagcagaagtgggttagtcggttggtgaaaaagatacctaaaaagcccccagctccagacccttttgcccgatcatctcctagaacttcaatgaagatacagcaaaaccagtctattagacggccaagtcgacagcttgccccaaacaaacctagctaactgccttctatgaaagcagtcattattcaaggtgatcgtattcttccagtgaaaacaagactgaaatatgatggcccaaaatttattaaaaagctatattttcctgagagactgatacatacactcatacatatatgtgttccccttttccctgtaatataaattacaaatctgggctcctttgaagcaacaggttgaaccaacaatgattggttgatagactaaggatatatgcaactcttccagacttttccataaagctctctcggcagtcgctcacactacaatgcacacaaggattgagaagagttaaaggctaaagaaaacatcttttctagcttcaacagagaggtttcaccagcacatttaccagaagaatctgggaatggattccactacagtgatattgactgcatctttaagaagtgaccattatactgtgtatatatatataaacacacacacatatatatatatatatatagtactctaatactgcaagaaggttttttaaacttcccactttattttttatacacattaatcagatatcattacttgctgcagttgcaactatgcacttgtataaagccataatgttggagtttatatcactcattcctgtgtacctgatggaagttgcatgttcatgtttaagcagttactgtaacaagaagtttaaagttaattatatcagtttcctaatgcttcatgataggcaactttacccattttgaatgccttaatttaatttttttcaaagtctcagccctgtctgtattaaaaaacaaaaaaagcgtttaccagctcttaggatgtaaactagctttgtggaagataaatcgtgcactatttttacacataaatagttatatcaatgtcagcctattttgattaacaaatgtttttaaagtattattggttatagaaacaataatggatggtgttggaactaatatatccttgatgtctgtctattattcattcaactctttttacagacctcagtattagtctgtgactacaaaatattttatttgctttaaatttgctggctaccctagatgtgtttttattcctggtaaagacatttgtgattacattttcacacttaagattcaaaatttttcccaaatataaagaaaactaagacagactgtagatgcattttaaatatttaaatatgatcctcagacatgcagctgtgtgtggcagtattttagtaccgggttaagaaaactggcaactgggaagaagtggcctcaaaggcacttaatttgatttttattttttaaatgctgtcaaagttacagtttacgcaggacattcttgccgtattctcatgatcccagataagtgtgtgttttatactgcaacaatatgcagcaatggtaagcgtaaagttttttttttgtttttgtttttttttatattatgaagtcttttaacagtctctctttatataaatacacagagtttggtatgatatttaaatacatcatctggccaggcatggtggcttacgcctgtaatcctagcactttgggaggccaagacgggcggatcacctgaggtgaggagttcaagaccagcctgcccaacatagtgaaactccgtctctaccaatatacaaaaattagccgggcatgatggtggtggcctgtaatcccagctacttgggaggctgagacaggagaatcgcttgaacccaggagacggtggttgcagtgagcgaagatcgagccactgcactccagcctgggcagctgaacaagactccgtctc

SEQ ID NO: 402 - DNA, 5067 bp, Homo sapiens
gcccggacacctgtctgcagcatggataagtatgacgacctgggcctggaggccagtaaattcatcgaggacctgaacatgtatgaggcctctaaggatgggctcttccgagtggacaagggtgcaggcaacaaccccgagtttgaggaaactcgcagggtgttcgccaccaagatggccaaaatccacctccagcagcagcagcagcagctcctgcaggaggagactctgcccagggggagtagaggccctgtcaatggagggggccgcctgggcccacaggcccgttgggaagttgtgggcagcaagctgactgtggatggtgctgccaagcctcctcttgctgcctcgacaggggcacctggggcagtcaccaccctcgctgctgggcagcccccgtacccaccgcaggagcagagatccaggccatacctgcatggcacgaggcatggcagccaggactgtggttccagggagagcctggcgacttctgagatgtctgctttccaccagccaggcccctgtgaggatccttcctgcctcactcatggagactattatgacaacctctccttggcaagcccaaagtggggtgacaaaccaggagtgtcccccagcatcggcctgagtgtagggagtgggtggcctagctccccggggagtgacccaccactgcccaaaccctgcggggaccatcccctaaatcaccgacagctctccctgagctccagcaggtcttctgagggtagcctcggtggtcagaatagtggcattggtggccgcagcagcgagaagccaacaggcctttggtccactgcctcctcccagcgggtgagccctggcctgccttccccaaacttggagaacggagcaccagctgtggggcctgttcagcccaggactccttctgtgtcagcacccttggccctgagctgccccaggcaaggaggtcttccaagatcaaactcggggctggggggtgaggtttcaggtgtgatgtccaaacccaatgtggacccccaaccctggttccaggatgggcccaaatcttacctttccagttctgccccgtcatcctcgccagctggcctggacggttcacagcagggtgcggtccctgggctggggccgaagcctggctgcacagaccttggcactggtcccaagctcagccccaccagtcttgtccatccagtgatgtccaccctgcctgagttatcttgtaaagagggtcccctgggctggtcttctgatggtagcctgggatctgtgctcctggacagccccagctcccctagggtaaggctgccctgccagcccctcgtcccaggtcctgagctgagaccctctgctgctgagttgaaattagaagccctcacccaacgtctggagcgagagatggatgctcacccgaaggctgattactttggagcctgtgtgaaatgcagcaaaggggtgtttggggctggccaggcctgtcaggccatggggaacctctaccatgacacatgcttcacctgtgcagcttgcagccggaagctgagaggaaaagccttttattttgtcaacggcaaagtgttttgtgaagaagacttcctgtactctggtttccagcagtcggctgacaggtgttttctttgtggacatctgatcatggacatgatcctgcaagccctggggaagtcctaccaccccggctgtttccgctgtgtcatctgtaatgagtgtttggatggggtgcccttcaccgtggactcagagaacaagatctactgtgtccgagattaccacaaggtgctggcccccaagtgtgcagcctgtgggcttcccatccttccacctgagggctcagatgagaccatccgtgtcgtgtccatggacagagactaccacgtggagtgttaccactgcgaggactgtggtctggagctcaatgatgaagatggccaccgctgttatccgctggaggaccacctgttctgtcactcctgccacgtgaagaggctggagaagagaccctcatctacagcccttcaccagcaccacttctagccagagccacttgcagacatcacggcaggggatgaggagccggggttgctgctgctgcttccggtggcccctggggtggaagtggggtaggggaagaggaggggcaggagggagagttcctgtgagcatgtggggggtgcctttcctttaaccagggaggtgaacactacctgcctcctgcgtgtattttccaagtgcttttctctgttgccacattttcctcaggttactcaggaaaatgctccagcatgtgcgagcacatgacctgaggttgcatcatagcaccaaaggaatcctcctgtcccctctgggaacatttcatgcttcagagggagaggtttttattgagcttgtttcacaatatccccttgaagggacagctcagctgccaatacattcaaccctttctcttccttcaggaaaatacctatacccaaatgttccctcccccgacatatatcatggcatgacttaaggcttcttttcacctgagagcttcagttcttctgcagaatggctgcaaatttaattgcattaaggcaagaaggaagctctaatgtgtgctttgtatcctaagataaatttgcttagaaaaccagagtcaagatttgaaataggtgaggcagggtttcctccttagacactgacagcattctccgtaccccttcaaatccttactctcctaaaggcagctgagtccgcgacagaaatttgccctatgggagtaaaacatactttgggagaagaacttggtgcaggcaccaggatttttttttttgcccacgtgtttgcgctgtttttctctggagttctcaagagttggtgacttggaaggccgcttctgcaaggcaagtctcaggaacccatgcaggtacatcgcttgcacctgtttttagcttatttaatgacgggcttttgggaagagctgcccgcatactgagagacagcttcttataaacaaggagagtttttgtgtgtgcgagatctctaagccagcgtgggagggagcgcctcaggataagttattatattcatttcgttggtttctctcctgcccaattcttggcacaggcattatgtttgaagaaaccaggataaggtacactgcttttgtctgtttaatttttttagttgtttcccttcactttcagtcttccacacacaaaaaatacctcacagagcttcaccaaatcacagattcaggaggaatttggctttcacactggactcagataccttcttcagtgtgttggaaatcactggcttcacacaggcccaactccaactggtcagggcagagtgatcgtaactaaaggtcagtggggaatagatccgattcagtgcttttgccttatgcatttcagcatcctggctccccagggtggcaggagctgaggaagggccacacactggcaagatttcaagaccactctctgcactgaagaggtaaaatttgcactgcaagtcacatccctgaggccagaggtcagtaccctttggtatttcgattagaagaagctgcaaaagaaaggcagcccattttaccattgccagccaggccggggacacaggagccggtgtgtgcactctgcctcctaacattgcacccagagcaagaggactgggtgctgggctgcagaggccggtcagtggagcccctagcacgtgtgaactcaggcttttcattgggcccggctccacttctaggccatgttttgactcatttggtaaccattgcctgtaagcagcacagaattggtgccatggattatcttttccatgttgatggaattcattctgttggaatcctttggccagatgtcacttcagccagggtgtgcatcatcattggttctttttcacaggctgagcctcctgaaaacccatgaacgctggggctggggaagtgaaccctgaggtggggaccctctcttcccatcaaatcatccagctcagtgtggggcgtggcaggggggtaaatgaagccagccaatgtgttaacctgtctctgtcaacctaagaatgttggccttactgacacacctttgctccatgttcaagaccagaagtagctgggatttgtttgcaaattgggtaattagtttaaaaatctgtgattacatttttaaatgaaattttcaaagtggcctagattgaggtgattcagataggtttgcgaatataccattttatattgttgagaaagaacaaaaagggaatttccagatgtcctagaaatcctagcaacagatttctctggttgtcagtttccctggagaaggcgccagataggaatctccaatcagttgtttttctcttcgcttcaggcccttacacaaaagccatgaagagatgttcacctacccggtattttaaatgttctgtaaattattagccaaatagaactgtaatggggttgtatttatgggcgcctagaaagaaaacacaaggacttggtaggccaggaagaaaagattttaaaatttagaatgaatagcccttctgggttttctttttgacaattcttggacttgaggtaaaacaaggaggattgtggccggatttcagatcccaaagccagcctccatcttaggcctttgcctcattgtgccttttaggttttcttacccaccgtctcctgttttgtcttttttttcttttctcctacccctatcttgggacattcagaaactgcctgggtggtttgagaagagacaacccagtttgatctgcaatacaaggatccattcgtaatctctctctcactgatgttattcccccatctgccgtcttggttcatctcaccacagaagggcatttagtcctacccagccatcggctgcggtatgacagcaggatggcacttcccatttctctgtggttagtgctcgagtgaaaacctctttcagctgagtcctctgaggttctgctgttgagtcctgggtggctgatggaatgattgaggaggtctggtcaccctcaagcgccgtcatcgccttgtttccatgggcttct

SEQ ID NO: 403 - DNA, 4596 bp, Homo sapiens
aggctgcccgagcttctgagcgagcgcggtgcttttgggaacgcgggacgggcgatctgcggcgccaggagctgggccgaggcgcggcggcgcggctgccggctgccctgtgaatgggaagttacgcgaagtccacccagcgtttctgaggcaatctgaaggcaaatcctgtttagacccaggcgaaggttcccggtgacccgggctctcaccagccaattgtcccttgccgtcctcctgagggtgcctggagcttaagcactgtgtgctcttggcctccacactggggatgccgctgactcccactgtccagggcttccagtggattctccgaggccctgatgtagaaacttccccattgggtgcaccaagagcagcctcacatggtgtgggctgacatcaagagctgccagatccaacagatggccaatctttcctaagctgctcaccttacaagaaaacgaatcgtactgctaagaattcaaacttcagcagtcatggggagccttggaaggagcccgaatcactgatggaattggacagtgcatggagatggttcagcaggacaaggtgtcattggaggacagtgtggagtgcagagagacatgctttgaaatgggattgatccagtcctccttccttcactaccacatgaatgctgggcagcccagggtcaacccaccgcaccctcaactcagacggttacctggcacgctggccacagtctacctcactcttatcagagtctgagctactggcagtgctttcagctctgagttcaggcacctcgaaccttgtttttgtggtgaaggaacctaaagtgctgtggggagtgatcacatttttcacaacatccctggctccacctcttctgccacaaacgtcagcatggtggtatcagccggcccttggtccagcgagaaggcagagacgaacattttagaaatcaacgagaaattgcgcccccagctggcagagaacaaacagcagttcagaaacctcaaagagaaatgttttgtaactcaactggccggcttcctggccaaccgacagaagaaatacaagtatgaagagtgtaaagacctcataaaatttatgctgaggaatgagcgacagttcaaggaggagaagcttgcagagcagctcaagcaagctgaggagctcaggcaatataaagtcctggttcactctcaggaacgggagctgacccagttaagggagaagttacgggaagggagagatgcctcccgctcattgaatcagcatctccaggccctcctcactccagatgagccagacaagtcccaggggcaggacctccaagaacagctggctgaggggtgtagactggcacagcaccttgtccaaaagctcagcccagaaaatgacgaagatgaggatgaagatgttcaagttgaggaggctgagaaagtactggaatcatctgcccccagggaggtgcagaaggctgaagaaagcaaagtccctgaggactcactggaggaatgtgccatcacttgttcaaatagccacggcccttgtgactccaaccagcctcacaagaacatcaacatcacatttgaggaagacaaagtcaactcaactctggttgtagacagagaatcctctcatgatgaatgtcaggatgctgtaaacattctcccagtccctggccccacctcttctgccacaaacgtcagcatggtggtatcagccggccctttgtccagcgagaaggcagagatgaacattctagaaatgaatgagaaattgcgcccccagctggcagagaagaaacagcagttcagaaacctcaaagagaaatgttttgtaactcaactggccggcttcctggccaaccagcagaacaaatacaaatatgaagagtgcgaagacctcataaaatctatgctgaggaatgagcgacagttcaaggaggagaagcttgcagagcagctcaagcaagctgaggagctcaggcaatataaagtcctggttcactctcaggaacgagagctgacccagttaagggagaagttacgggaagggagagatgcctcccgctcattgaatcagcatctccaggccctcctcactccggatgagccagacaagtcccaggggcaggacctccaagaacagctggctgaggggtgtagactggcacagcaccttgtccaaaagctcagcccagaaaatgacgaagatgaggatgaagatgttcaagttgaggaggctgagaaagtactggaatcatctgcccccagggaggtgcagaaggctgaagaaagcaaagtccctgaggactcactggaggaatgtgccatcacttgttcaaatagccacggcccttgtgactccaaccagcctcacaagaacatcaacatcacatttgaggaagacaaagtcaactcagctctggttgtagacagagaatcctctcatgatgaatgtcaggatgctgtaaacattctcccagtccctggccccacctcttctgccacaaacgtcagcatggtggtatcagccggccctttgtccagcgagaaggcagagatgaacattctagaaatgaatgagaaattgcgcccccagctggcagagaagaaacagcagttcagaaacctcaaagagaaatgttttgtaactcaactggcctgcttcctggccaaccagcagaacaaatacaaatatgaagagtgcaaagacctcataaaatctgtgctgaggaatgagcgacagttcaaggaggagaagcttgcagagcagctcaagcaagctgaggagctcaggcaatataaagtcctggttcactctcaggaacgggagctgacccagttaagggagaagttacgggaagggagagatgcctcccgctcattgaatcagcatctccaggccctcctcactccggatgagccagacaagtcccaggggcaggacctccaagaacagctggctgaggggtgtagactggcacagcaacttttccaaaagctcagcccagaaaatgacaatgatcacgatgaagatgttcaagttgaggtggctgagaaagtgcagaaatcgtctgcccccagggagatgcagaaggctgaagaaaaggaagtccctgaggactcactggaggaatgtgccatcacttgttcaaatagccatggcccttatgactccaaccagccacataggaaaaccaaaatcacatttgaggaagacaaagtcgactcaactctcattggctcatcctctcatgttgaatgggaggatgctgtacacattatcccagaaaatgaaagtgatgatgaggaagaggaagaaaaagggccagtgtctcccaggaatctgcaggagtctgaagaggaggaagtcccccaggagtcctgggatgaaggttattcgactctctcaattcctcctgaaatgttggcctcgtaccagtcttacagcggcacatttcactcattagaggaacagcaagtctgcatggctgttgacataggcggacatcggtgggatcaagtgaaaaaggaggaccaagaggcaacaggtcccaggctcagcagggagctgctggatgagaaagggcctgaagtcttgcaggactcactggatagatgttattcaactccttcaggttatcttgaactgaccgactcatgccagccctacagaagtgccttttacatattggagcaacagcgtgttggctgggctcttgacatggatgaaattgaaaagtaccaagaagtggaagaagaccaagacccatcatgccccaggctcagcagggagctgctggatgagaaagagcctgaagtcttgcaggactccctggatagatgttattcgactccttcaggttatcttgaactgcctgacttaggccagccctacagaagtgctgtttactcattggaggaacagtaccttggcttggctcttgacgtggacagaattaaaaaggaccaggaagaggaagaagaccaaggcccaccatgccccaggctcagcagggagctgctggaggcagtagagcctgaagtcttgcaggactcactggatagatgttattcaactccttccagttgtcttgaacagcctgactcctgcctgccctatggaagttccttttatgcattggaggaaaaacatgttggcttttctcttgacgtgggagaaattgaaaagaaggggaaggggaagaaaagaaggggaagaagatcaacgaagaaaagaaggagaaggggaagaaaagaaggggaagaagatcaaaacccaccatgccccaggctcagcggcatgctgatggaagtggaagagcctgaagtcttgcaggactcactggatagatgttattcgactccgtcaatgtactttgaactacctgactcattccagcactacagaagtgtgttttactcatttgaggaacagcacatcagcttcgcccttgacgtggacaataggtttcttactttgatgggaacaagtctccacctggtcttccagatgggagtcatattcccacagtaagcagcccttactaagccgagagatgtggatccgcaatcactagtgaattcgcggccgcctgca

SEQ ID NO: 404 - DNA, 6247 bp, Homo sapiens
atgcggctctcatctagaggcttgggaccatttctttcccaggatgctcgtattgttgactccaatcagttgactacaactaagagggaaagggcaagggtgcgggaaaaaccccctcccgccccggggccccggcagcactcggggacgccagcacgccgggctccttcccacccgcgaaccgcgctccccgcagggcgggccggggcggggaaaaaggagctcgacgcgaagggccgcgggcggcctgggaagggaggagggagacttgggaggctgccgggcggttttattgtttcctttcgccctcctcctaccgcgcctccgccccagcgtcactggaaagccgcccgagccgcccggcggcaggttatttatagcgcgggctgcgcgcgcgtcacggagcccggcccggctgacggggccgctgacgcgcttggccgcggggccgagtccgcggggctgcgcgccggacgccggcgacaatgggcttctgtgtgcagctgccgcagccgccgggggccgggggccgggggccgggggaggggggcgggcgactccccggctcccttcttggtcggccgcgaccccccgaaaggtaacaggcctctttcgcccccggccaggacctgggccctgtgggctttttttttttccattttatcagtaagttccccttgtcccagcctccgctttcacttcccgcgttccctccaccccaaaaaccgccccaacatgtccagagaggggcatctacccagccgcccagccaggggcgaccactttgtgagccccggggagcgggacccgtaccaggcgcgcccagcgggggatgcggtgaccgaggggccgggagcgccgggcaggtaacgtatcctggacctagagtcgggggactttgtttggggcgggaggagcggaacaggggtgggtgtgaacgccggacggcccttccgggactcctgtcccccctccttcgccccactcgcctgcgcgctggaagccaatctgggtgtgtagcgcgaagagcgaaagagaaacttctgcgtgactgactagatgaggctcctcccgagaagccgagataatagaggccccctctcccgccgcccgcctttttctcctcccccggccgctcgctcctgtcgccccacccctcgaaggctggcgcggattttagggacttcctgggatgcggagatcggctctgaaccatcccctttctgctgcccggagctggggaagctcgctgtggagcgtctcgcacgtggcaggcaggcagagaacttgctgcaccttctaggaaattgcaatcgatttgtaatgcactttcgctaattgggagttcaaaattaaactttaataaagcattcgtgtcgtctcgtctaattgtgaaagcttccatccgtcctggtagatagactctaagtctcaagttaatggcgctaagctagattttccccccaagtacaattccgtcagccgtcgtcggcgcagctggatttccgtaaggtacagatgttgctaatgacagcttaagcacggatgggcagatagcatacggaatgcaacatgttgccatatggttcctttagcctttcacctccagggatatcaatcacatatattctgggaggaacttaatgactctctgaacagcaaaatgaattacctggtacaatttatatcccttgacctgatacgttataacaacaggaagatagcatctcgcaatttctgtggtataaattgaactacagagctacatttaaaattctacatctatttgtagtttaaggggccctgtcatattctggctgtaaaatctgtttctgtattgcccatctccttccccctcctacctctggaggaagcaaaatttataaagtttagcaaaactggtgtcggaaattgccagtcaactgattaatagatgaagtatggagaaatggaaaatatgacttccagagctacttacttcaacaagaattagccatctttaggaacaccatacttttaagcgtacaaaattaaagaactccagaaaatgtattttctgctagttgtttcagtatagctcctaaatctattcattaactatttgaaattctccatttattttcaaacttcaaccattcctacactttggaaattacagaagacagttctcagaaatatgaaatacaggaaatgtaagtagcacctcctcagcgaaccagtttctgtacccacaaccccatgcactcactatttatgtagcttaatttgaatcatgtacatggtggtactggtagtttgctttttcctcccaacatgtcagtgacagcatacttaagttgctgcttctctcctagtggagtgattctgcaatatttcacaggtctcatttttaaatatcctggtgactaataaaatgttttaattgattgcctttaatttcagattataaacgtggttgtcttactgtatcctttattttctattcactaatacagatagatcacacgggaagacaatactttaagggcaaaaagtaaaataacttactagaatttctaaactttatgtttacttttacctactaagggatatctgaaaggtagagacatacttttaaaactttttgcttctggcactatgtaaacattaattcatgtaaactaatgactagcagaatgcctaagatagacatgaacagtctgaaaaagtatttactttcagtcatgtcaagtttcggaaagtgttaacattttgaaagtttgtctatatatcatgtcctttcataattattgtgaaattataagacgatgcttctccttttttttttcctttgtagtggctgatttgttacctagtgctttagttcgataattttgataattattatcaaataagatcctttgtgtgtgtatataggagaaaatcttatacagaacacattaagatatacataagttatggcaatcttgtcttctggggctgttttttaaatcttttaatggctgaggttttatttctctttgtagcaccagcactcgatgtgtcttaaatgtgatcagtagtgatggtgagcttgtcaataatgactccatctccatgacttgtgaataggcggtgagtgtgtcctttaatcagtcacacagaacttgctttataaagctgttattgtcatgaacagatattgcagtcttgtcaggcccagtgattattaaagtgttccttcttcaaaagccaggccgaaagtcctgctgtgcttcatttcacaattgaagtccattagtaaataaaatcccaagccgcacgatttgctgttcctcaagttataggcttacatatatttcattaataatcttgggcccttttgtagacataagtaggtatatttttggtatatatatatggcaacaaaaataaaatatgtatcttgcagcatgacttttattttaaatgaagatttgatggatgtccattgttactctaaatgaggtggctggctgccaagggaaaccctacagtcagaaagtactagaattgttactatctacagggaatcactttctattttttgagttctcaacttcacctcctcctttcaatagtgcccctccatattgctaatctgagaattagtctgaatatgaaaacttttgaaaatatgtttgtgttgtccaagaaaaatttcaccagtgtttctggttgcctgctggttttcagcctttatcttgagtgggcatgtttattctaactgaatgaagaatgactattgaattaggtatattccccatgccaaataattttaactgtgatgtaatcctagccgctttcttatttttactcccgaataaatttaaaatatttaagattggccaggtgtctgtttttctcagggtaacatgggacagctatggataggcattaggcctctcatagaactcttcattcaagtgagtgtggctgagaggaacaaccaggaaagagtatagtgccccattgcacttgccctgttggcttttcaaatgcaaaatccacgttgttgcatttggaaacttgtttctctgttttatggtatttcatttaagaattttttttaactgccagtctgtaaatatttaaccagccaagcaggaaacagccttttattctcgactgtatacagcttttgtttttatctgggttagcatgggtgccatgtaaataccatataaaatttgactttggttgtccttactttgaagattgacaggggtttctttaattaatcttgtttcctttcatgttctgtattgagatattgaaatacagtattttatacatttataggattgtgtttgcatttatttaatttatgtttctttttttgaagcatgtagccttgaatgtttgttctaccctttttttttttttcacatcattactctggtgctgcttgatgtaacttgattagctccctccccagtcatgattggtaattaaaataggcattaaaattagtcacttagcaattttgctgttcaattggcaattaaattacttaattgcaattaaagtcctaattttaattggcaaaatgatagatgtagatttaagataatatgtataaatactttaataagtgtctatataaggattacttaattactcaacttcaagtttatgctgttaactttagaacttttaagtgagcaatgaaatttatattacatctattcaaaggatatggtaattagatttattacttatcactataagggtccttgctttaagttacttttgtagtgttaaaattgtaggcttgataattgcagaattctgatgagaaaaagggcatatatgtctctgttgcaatattatcaataccttcatttttaaaattaaattgagacattccatccaccaattagtctgaggaaaaaatcaaaagtggttattttatcattaaagatagaacaaaaactagccagcttgtgatttacatataaaaacttgcaaaatgtatgtattttatctaaatttaaataaatgctatctaatactggtagtgttataatgctattaactacttttagaatttgcagatatttgatgttttcttagcatgtagcaacttattttcataatctttaaactgtcttttaggactttgtacattttagtgatgcctatgtttactaaaattagcaatgaaatctaaaaccaaagttattcttctttgcctaataaaaaatagttcttaaataagaaaatattaagtggttaatttaaaagcaagtatttaggagatggttactgggtgtcaagtattaacaaaaaatgaaggatttttattatgcaaaatactttttgagtggcatgaggttttaccatatgttcagttttataatttcaatttacaagaagatgcttccagaaaaaagaatgctgttttttttctgcacatctttacacatttctagtactgagttctgtatcaaagaaagaaataattttaaaagtatttgtgttaagtggtttttggtaaaaatcggctgagaaatactgaataaaagctacaactatccaaaatgtgaatattaacaaagcaattgacttgttctttaaccatcctatgagaaaggaacaaacaatttggtcaattactatcctgtcaatgcaaatgaaatggcaaaagcaaaacaataaaaacactttcagaagtaaaaactaattttgtattttcagaaacagatttttttcaaagtgaaaatttatttcttgtatcagtaatgtgacttactgcccaatggcaacaaatgctgtgaatgagtttgtccaaatgtaatttaaaatatatatcttgtaatgctaaaaataggttctacaaagtaattttattatgaaaaatcttaaagttgcctcaactcgtaaagcataacaggtatgtctgtttcactatatctgcattgtaaggtctattctgaattcatttgggaagaatggtgaaataaatccctaaaggcctctttcctatgcattaaaatagaaaatcctatgggattacattcatgtttgctttctaaattatgccaaaagctcaattttattaagtataatctgcctagccatgcataaaataaactactttggtttagatgtgagtatatgtattatttatgttgatttttaatgaaaatatgtttacatgtaccaatatgttctgcctaatattggttaatgtcataaaagataatatagtaacattactttccta

SEQ ID NO: 405 - DNA, 1559 bp, Homo sapiens
gactgcgcggccgggaggagccgagccgggcggcggcggcgggaggctacagcgcgcgggggtctcccgcgtcccctccgcctcgccgggagctcgcgccctcgcccagccgagctcccacccccgcttttttccgaaggcgctgggcggcgccaccctccggccggagcccggcactgcacaaccccctccgactttcaatgttccacactccccggccagagcctcctcggcttctttttttccctccccccccttcccccccccacagctgcctccatttccttaaggaagggtttttttctctctccctcccccacaccgtagcggcgcgcgagcgggccgggcgggcggccgagttttccaagagataacttcaccaagatgtccagtgataggcaaaggtccgatgatgagagccccagcaccagcagtggcagttcagatgcggaccagcgagacccagccgctccagagcctgaagaacaagaggaaagaaaaccttctgccacccagcagaagaaaaacaccaaactctctagcaaaaccactgctaagttatccactagtgctaaaagaattcagaaggagctagctgaaataacccttgatcctcctcctaattgcagtgctgggcctaaaggagataacatttatgaatggagatcaactatacttggtccaccgggttctgtatatgaaggtggtgtgttttttctggatatcacattttcatcagattatccatttaagccaccaaaggttactttccgcaccagaatctatcactgcaacatcaacagtcagggagtcatctgtctggacatccttaaagacaactggagtcccgctttgactatttcaaaggttttgctgtctatttgttcccttttgacagactgcaaccctgcggatcctctggttggaagcatagccactcagtatttgaccaacagagcagaacacgacaggatagccagacagtggaccaagagatacgcaacataattcacataatttgtatgcagtgtgaaggagcagaaggcatcttctcactgtgctgcaaatctttatagcctttacaatacggacttctgtgtatatgttatactgattctactctgcttttatcctttggagcctgggagactccccaaaaaggtaaatgctatcaagagtagaactttgtagctgtagattagttatgtttaaaacgcctacttgcaagtcttgcttctttgggatatcaaaatgtattttgtgatgtactaaggatactggtcctgaagtctaccaaatattatagtgcattttagcctaattcattatctgtatgaagttataaaagtagctgtagatggctaggaattatgtcatttgtattaaacccagatctatttctgagtatgtggttcatgctgttgtgaaaaatgttttaccttttacctttgtcagtttgtaatgagaggatttccttttaccctttgtagctcagagagcacctgatgtatcatctcaaacacaataaacatgctcctgaaggaaaaaaaaaaaaaaaa

SEQ ID NO: 406 - DNA, 3820 bp, Homo sapiens
ctttgcgcgagtgtcttggttgagcgcagcgcccattcattgcccgcgagcgtccatccatctgtccggccgactgtccagcgaaaggggctccaggccgggcgcagccgccacccgggggaccgaggccaggagaggggccaagagcgcggctgacccttgcgggccggggcaggggacggtggccgcggccatgcagtcctgtgccagggcgtgggggctgcgcctgggccgcggggtcgggggcggccgccgcctggctgggggatcggggccgtgctgggcgccgcggagccgggacagcagcagtggcggcggggacagcgccgcggctggggcctcgcgcctcctggagcgccttctgcccagacacgacgacttcgctcggaggcacatcggccctggggacaaagaccagagagagatgctgcagaccttggggctggcgagcattgatgaattgatcgagaagacggtccctgccaacatccgtttgaaaagacccttgaaaatggaagaccctgtttgtgaaaatgaaatccttgcaactctgcatgccatttcaagcaaaaaccagatctggagatcgtatattggcatgggctattataactgctcagtgccacagacgattttgcggaacttactggagaactcaggatggatcacccagtatactccataccagcctgaggtgtctcaggggaggctggagagtttactcaactaccagaccatggtgtgtgacatcacaggcctggacatggccaatgcatccctgctggatgaggggactgcagccgcagaggcactgcagctgtgctacagacacaacaagaggaggaaatttctcgttgatccccgttgccacccacagacaatagctgttgtccagactcgagccaaatatactggagtcctcactgagctgaagttaccctgtgaaatggacttcagtggaaaagatgtcagtggagtgttgttccagtacccagacacggaggggaaggtggaagactttacggaactcgtggagagagctcatcagagtgggagcctggcctgctgtgctactgaccttttagctttgtgcatcttgaggccacctggagaatttggggtagacatcgccctgggcagctcccagagatttggagtgccactgggctatgggggaccccatgcagcattttttgctgtccgagaaagcttggtgagaatgatgcctggaagaatggtgggggtaacaagagatgccactgggaaagaagtgtatcgtcttgctcttcaaaccagggagcaacacattcggagagacaaggctaccagcaacatctgtacagctcaggccctcttggcgaatatggctgccatgtttgcaatctaccatggttcccatgggctggagcatattgctaggagggtacataatgccactttgattttgtcagaaggtctcaagcgagcagggcatcaactccagcatgacctgttctttgataccttgaagattcagtgtggctgctcagtgaaggaggtcttgggcagggccgctcagcggcagatcaattttcggctttttgaggatggcacacttggtatttctcttgatgaaacagtcaatgaaaaagatctggacgatttgttgtggatctttggttgtgagtcatctgcagaactggttgctgaaagcatgggagaggagtgcagaggtattccagggtctgtgttcaagaggaccagcccgttcctcacccatcaagtgttcaacagctaccactctgaaacaaacattgtccggtacatgaagaaactggaaaataaagacatttcccttgttcacagcatgattccactgggatcctgcaccatgaaactgaacagttcgtctgaactcgcacctatcacatggaaagaatttgcaaacatccacccctttgtgcctctggatcaagctcaaggatatcagcagcttttccgagagcttgagaaggatttgtgtgaactcacaggttatgaccaggtctgtttccagccaaacagcggagcccagggagaatatgctggactggccactatccgagcctacttaaaccagaaaggagaggggcacagaacggtttgcctcattccgaaatcagcacatgggaccaacccagcaagtgcccacatggcaggcatgaagattcagcctgtggaggtggataaatatgggaatatcgatgcagttcacctcaaggccatggtggataagcacaaggagaacctagcagctatcatgattacatacccatccaccaatggggtgtttgaagagaacatcagtgacgtgtgtgacctcatccatcaacatggaggacaggtctacctagacggggcaaatatgaatgctcaggtgggaatctgtcgccctggagacttcgggtctgatgtctcgcacctaaatcttcacaagaccttctgcattccccacggaggaggtggtcctggcatggggcccatcggagtgaagaaacatctcgccccgtttttgcccaatcatcccgtcatttcactaaagcggaatgaggatgcctgtcctgtgggaaccgtcagtgcggccccatggggctccagttccatcttgcccatttcctgggcttatatcaagatgatgggaggcaagggtcttaaacaagccacggaaactgcgatattaaatgccaactacatggccaagcgattagaaacacactacagaattcttttcaggggtgcaagaggttatgtgggtcatgaatttattttggacacgagacccttcaaaaagtctgcaaatattgaggctgtggatgtggccaagagactccaggattatggatttcacgcccctaccatgtcctggcctgtggcagggaccctcatggtggagcccactgagtcggaggacaaggcagagctggacagattctgtgatgccatgatcagcattcggcaggaaattgctgacattgaggagggccgcatcgaccccagggtcaatccgctgaagatgtctccacactccctgacctgcgttacatcttcccactgggaccggccttattccagagaggtggcagcattcccactccccttcgtgaaaccagagaacaaattctggccaacgattgcccggattgatgacatatatggagatcagcacctggtttgtacctgcccacccatggaagtttatgagtctccattttctgaacaaaagagggcgtcttcttagtcctctgtccctaagtttaaaggactgatttgatgcctctccccagagcatttgataagcaagaaagatttcatctcccaccccagcctcaagtaggagttttatatactgtgtatatctctgtaatctctgtcaaggtaaatgtaaatacagtagctggagggagtcgaagctgatggttggaagacggatttgctttggtattctgcttccacatgtgccagttgcctggattgggagccattttgtgttttgcgtagaaagttttaggaactttaacttttaatgtggcaagtttgcagatgtcatagaggctatcctggagacttaatagacatttttttgttccaaaagagtccatgtggactgtgccatctgtgggaaatcccagggcaaatgtttacattttgtataccctgaagaactctttttcctctaatatgcctaatctgtaatcacatttctgagtgttctcctctttttctgtgtgaggtttttttttttttaatctgcatttattagtattctaataaaagcatcttgatcggaagaaaaaaaaaaaaa

SEQ ID NO: 407 - DNA, 5880 bp, Homo sapiens; identical to SEQ ID NO: 140

SEQ ID NO: 408 - DNA, 2360 bp, Homo sapiens
gacgggcccggctgtagcggcggcggccgcggcgtcttaagcggcgcccagtgcaggatggtgctggaggcggcggcggccgtggtggcggcagcgtcgttggcggcagcgggagtgggtgcggcggcagcggcggcggcgcccgcgggtggtataaaatggcggatttcgaagagttgaggaatatggtttctagttttagggtttctgaactacaagtattactaggctttgctggacggaataaaagtggacgcaagcatgacctcctgatgagggcgctgcatttattgaagagcggctgcagccctgcggttcagattaaaatccgagaattgtatagacgccgatatccacgaactcttgaaggactttctgatttatccacaatcaaatcatcggttttcagtttggatggtggctcatcacctgtagaacctgacttggccgtggctggaatccactcgttgccttccacttcagttacacctcactcaccatcctctcctgttggttctgtgctgcttcaagatactaagcccacatttgagatgcagcagccatctcccccaattcctcctgtccatcctgatgtgcagttaaaaaatctgcccttttatgatgtccttgatgttctcatcaagcccacgagtttagttcaaagcagtattcagcgatttcaagagaagttttttatttttgctttgacacctcaacaagttagagagatatgcatatccagggattttttgccaggtggtaggagagattatacagtccaagttcagttgagactttgcctggcagagacaagttgccctcaagaagataactatccaaatagtctatgtataaaagtaaatgggaagctatttcctttgcctggctatgcaccaccgcctaaaaatgggattgaacagaagcgccctggacgccccttgaatattacatctttagttaggttatcttcagctgtgccaaaccaaatttccatttcttgggcatcagaaattgggaagaattactctatgtctgtatatcttgtacggcagcttacatcagccatgttattacagagattaaaaatgaaaggtattagaaaccctgatcattccagagcactaattaaagaaaaacttactgcagatcctgatagtgaaattgctacaactagccttcgggtatccttgatgtgccctttaggaaaaatgaggctgacaatcccatgccgtgcagtgacttgtacacatctgcagtgttttgatgctgccctctatctacaaatgaatgagaaaaagcccacctggatttgtcctgtgtgtgacaaaaaagctgcctatgaaagtctaatattagatgggctttttatggaaattctcaatgactgttctgatgtagatgagatcaaattccaagaagatggttcttggtgtccaatgagaccgaagaaagaagctatgaaagtatccagccaaccgtgtacaaaaatagaaagttcaagcgtcctcagtaagccttgttcagtgactgtagccagtgaggcaagcaagaagaaagtagatgttattgatcttacaatagaaagctcttctgacgaagaggaagaccctcctgccaaaaggaaatgcatctttatgtcagaaacacaaagcagcccaaccaaaggggttctcatgtatcagccatcttctgtaagggtgcccagtgtgacttcggttgatcctgctgctattccgccttcattaacagactactcagtaccattccaccatacgccaatatcaagcatgtcatcagatttgccaggtttggattttctttcccttattccagttgatccccagtactgtcctcctatgtttttggatagtctcacctcacccttaacagcaagcagtacgtctgtcaccaccaccagctcccatgaaagcagtactcatgttagttcatccagcagcaggagtgagacaggggtcataaccagcagtggaagtaacattcctgacatcatctcattggactaaaggaggactcacttgattctgggaatcattcatcagaactgctttttcttggatctctagtctgtggaaacgttcttttttttttttttttaataatttggtatttattgaaagtcagatggattcttttgctttctgaggggtgaacacagaagactgcaacaagaaccaaatgacatgcaaggatttttcttaattatgctgtactctcagcatcagatacattcaaccataactgtatcttcctgagagatggatttcactttcatacgttaatggatggagtctacaaatcagtgaaaaaagtttttgttaaaataaagagcaataaaatta

SEQ ID NO: 409 - DNA, 4247 bp, Homo sapiens
gttccccaactgctgttttattgtgctattcatgcctagacatcacatagctagaaaggcccatcagacccctcaggccactgctgttcctgtcacacattcctgcaaaggaccatgttgctaacttgaaaaaaattactattaattacacttgcagttgttgcttagtaacatttatgattttgtgtttctcgtgacagcatgagcagagatcattaaaaattaaacttacaaagctgctaaagtgggaagaaggagaacttgaagccacaatttttgcacttgcttagaagccatctaatctcaggtttatatgctagatcttgggggaaacactgcatgtctctggtttatattaaaccacatacagcacactactgacactgatttgtgtctggtgcagctggagtttatcaccaagacataaaaaaaccttgaccctgcagaatggcctggaattacaatcagatgggccacatggcatcccggtgaaagaaagccctaaccagttttctgtcttgtttctgctttctccctacagttccaccaggtgagaagagtgatgaccatccttttccttactatggttatttcatactttggttgcatgaaggctgcccccatgaaagaagcaaacatccgaggacaaggtggcttggcctacccaggtgtgcggacccatgggactctggagagcgtgaatgggcccaaggcaggttcaagaggcttgacatcattggctgacactttcgaacacgtgatagaagagctgttggatgaggaccagaaagttcggcccaatgaagaaaacaataaggacgcagacttgtacacgtccagggtgatgctcagtagtcaagtgcctttggagcctcctcttctctttctgctggaggaatacaaaaattacctagatgctgcaaacatgtccatgagggtccggcgccactctgaccctgcccgccgaggggagctgagcgtgtgtgacagtattagtgagtgggtaacggcggcagacaaaaagactgcagtggacatgtcgggcgggacggtcacagtccttgaaaaggtccctgtatcaaaaggccaactgaagcaatacttctacgagaccaagtgcaatcccatgggttacacaaaagaaggctgcaggggcatagacaaaaggcattggaactcccagtgccgaactacccagtcgtacgtgcgggcccttaccatggatagcaaaaagagaattggctggcgattcataaggatagacacttcttgtgtatgtacattgaccattaaaaggggaagatagtggatttatgttgtatagattagattatattgagacaaaaattatctatttgtatatatacataacagggtaaattattcagttaagaaaaaaataattttatgaactgcatgtataaatgaagtttatacagtacagtggttctacaatctatttattggacatgtccatgaccagaagggaaacagtcatttgcgcacaacttaaaaagtctgcattacattccttgataatgttgtggtttgttgccgttgccaagaactgaaaacataaaaagttaaaaaaaataataaattgcatgctgctttaattgtgaattgataataaactgtcctctttcagaaaacagaaaaaaaacacacacacacacaacaaaaatttgaaccaaaacattccgtttacattttagacagtaagtatcttcgttcttgttagtactatatctgttttactgcttttaacttctgatagcgttggaattaaaacaatgtcaaggtgctgttgtcattgctttactggcttaggggatgggggatggggggtatatttttgtttgttttgtgtttttttttcgtttgtttgttttgttttttagttcccacagggagtagagatggggaaagaattcctacaatatatattctggctgataaaagatacatttgtatgttgtgaagatgtttgcaatatcgatcagatgactagaaagtgaataaaaattaaggcaactgaacaaaaaaatgctcacactccacatcccgtgatgcacctcccaggccccgctcattctttgggcgttggtcagagtaagctgcttttgacggaaggacctatgtttgctcagaacacattctttccccccctccccctctggtctcctctttgttttgttttaaggaagaaaaatcagttgcgcgttctgaaatattttaccactgctgtgaacaagtgaacacattgtgtcacatcatgacactcgtataagcatggagaacagtgatttttttttagaacagaaaacaacaaaaaataaccccaaaatgaagattattttttatgaggagtgaacatttgggtaaatcatggctaagcttaaaaaaaactcatggtgaggcttaacaatgtcttgtaagcaaaaggtagagccctgtatcaacccagaaacacctagatcagaacaggaatccacattgccagtgacatgagactgaacagccaaatggaggctatgtggagttggcattgcatttaccggcagtgcgggaggaatttctgagtggccatcccaaggtctaggtggaggtggggcatggtatttgagacattccaaaacgaaggcctctgaaggacccttcagaggtggctctggaatgacatgtgtcaagctgcttggacctcgtgctttaagtgcctacattatctaactgtgctcaagaggttctcgactggaggaccacactcaagccgacttatgcccaccatcccacctctggataattttgcataaaattggattagcctggagcaggttgggagccaaatgtggcatttgtgatcatgagattgatgcaatgagatagaagatgtttgctacctgaacacttattgctttgaaactagacttgaggaaaccagggtttatcttttgagaacttttggtaagggaaaagggaacaggaaaagaaaccccaaactcaggccgaatgatcaaggggacccataggaaatcttgtccagagacaagacttcgggaaggtgtctggacattcagaacaccaagacttgaaggtgccttgctcaatggaagaggccaggacagagctgacaaaattttgctccccagtgaaggccacagcaaccttctgcccatcctgtctgttcatggagagggtccctgcctcacctctgccattttgggttaggagaagtcaagttgggagcctgaaatagtggttcttggaaaaatggatccccagtgaaaactagagctctaagcccattcagcccatttcacacctgaaaatgttagtgatcaccacttggaccagcatccttaagtatcagaaagccccaagcaattgctgcatcttagtagggtgagggataagcaaaagaggatgttcaccataacccaggaatgaagataccatcagcaaagaatttcaatttgttcagtctttcatttagagctagtctttcacagtaccatctgaatacctctttgaaagaaggaagactttacgtagtgtagatttgttttgtgttgtttgaaaatattatctttgtaattatttttaatatgtaaggaatgcttggaatatctgctatatgtcaactttatgcagcttccttttgagggacaaatttaaaacaaacaaccccccatcacaaacttaaaggattgcaagggccagatctgttaagtggtttcataggagacacatccagcaattgtgtggtcagtggctcttttacccaataagatacatcacagtcacatgcttgatggtttatgttgacctaagatttattttgttaaaatctctctctgttgtgttcgttcttgttctgttttgttttgttttttaaagtcttgctgtggtctctttgtggcagaagtgtttcatgcatggcagcaggcctgttgcttttttatggcgattcccattgaaaatgtaagtaaatgtctgtggccttgttctctctatggtaaagatattattcaccatgtaaaacaaaaaacaatatttattgtattttagtatatttatataattatgttattgaaaaaaattggcattaaaacttaaccgcatcagaacctattgtaaatacaagttctatttaagtgtactaattaacatataatatatgttttaaatatagaatttttaatgtttttaaatatattttcaaagtacataaaaaaaaaaaaaaaaaa

SEQ ID NO: 410 - DNA, 4495 bp, Homo sapiens
gccggcgacgtcacgcggccgttacggcgctcaggcgtctcgacgcgcgcgatttaaaaccagctcaggagacgccaaggaaagatgggacctcccggcccagcactgccagccacaatgaataactcttcttcagagacgcgaggacacccccacagtgcctcctctccttcagagcgtgtgttcccgatgcccctgcccaggaaggcgcctctcaatattcctggcaccccagtcctcgaagactttcctcagaatgacgatgagaaggagcggctgcagcggaggcgctcgagggtctttgatctgcagttcagcactgactcacctcgcttattggcctccccctccagcaggagtattgacatttcagctactatccccaagtttacaaacacgcagattacggaacattactccacctgtatcaaactgtccactgaaaataaaatcactaccaagaatgcttttggtttgcacttgattgattttatgtcagagattcttaaacagaaagacaccgaaccaaccaactttaaagtggctgcgggtactctggatgccagcaccaagatctatgctgtgcgcgtggatgccgtccatgccgatgtatacagagtccttggggggctgggcaaagatgcaccgtctttggaagaagtagaaggccatgttgctgatggaagtgctactgaaatgggaacaaccaaaaaggctgtaaagccaaagaagaagcacttacacagaactattgagcagaacataaacaacctcaatgtctccgaagcagatcggaagtgtgagattgatcccatgtttcagaagacagcagcctcatttgatgagtgcagcacagcaggggtgtttctgtccactctccactgccaggactacagaagtgaactgctgtttccctctgatgtccagactctctccacgggagaacctctcgagttgccagagttaggttgtgtagaaatgacagatttaaaagcgcccttgcagcagtgtgcagaagatcgccagatctgcccttccctggccgggttccagtttacacagtgggacagtgaaacacataatgagtctgtgtcggccctggtagacaagtttaagaagaatgaccaggtatttgacatcaatgctgaagttgacgagagtgactgtggagacttccccgatgggtccctgggggatgactttgatgccaacgatgaacctgaccacaccgcagttggggatcatgaagagttcaggagctggaaggagccctgccaggttcagagctgccaggaagaaatgatttcccttggggatggagacatcaggaccatgtgcccccttctgtctatgaaacctggagaatattcttatttcagtcctcggaccatgtcgatgtgggctggcccggatcactggcgctttaggcctcgacgcaaacaagatgctccttcccaatcagaaaacaaaaagaagagtacaaaaaaagattttgaaattgactttgaagatgatattgactttgatgtatattttagaaaaacaaaggctgctactattctgaccaagtccactttggagaaccagaattggagagctaccacccttcctacagatttcaactacaatgttgacactctggtccagcttcacctcaaaccaggcaccaggttacttaagatggcccagggccatagggtagagactgagcattatgaagaaattgaagactatgattacaacaaccctaacgacacctccaacttttgccctggattacaggctgctgacagtgatgatgaagatttggatgacttatttgtgggacctgttgggaactctgacctctcaccttatccttgccatccacctaagacagcacaacagaatggtgacactccagaagcccaaggattagacatcacaacatatggggagtcaaacttggtagctgagcctcagaaggtaaataaaattgaaattcactatgccaagactgccaaaaagatggacatgaagaaactgaagcagagcatgtggagtctgctgacagcgctctccggaaaggaggcagatgcagaggcaaaccacagggaagctggaaaagaagcggccctggcagaagtggctgacgagaagatgcttagcgggctcacgaaggacctgcagaggagcctgccccctgtcatggctcagaacctctccatacctctggcttttgcctgtctcctacatttagccaatgaaaagaatctaaaactggaaggaacagaggacctctctgatgttcttgtgaggcaaggagattgagttcactatggagaagtcagcagcaggaggcccatcccttactcagttgccgggacatccccagtctcgggggaagaagatgccatgggcttatacccaggctgtagccaactaccaacgtgcctgtttgtttgttgctctttccttctctccatcatagtctgggtgccagcgccctgaagctccgtgctcaactgattaaactttactgccctatggtgaccatctaggagaggggagggcagagggggtgagggtactattctggattgagaaaacctatatccattctttatatcaatgtatagttttagtctcctaaattgatctgttattttccaaactattctcttgtagaaaattttccagtgggcacttaatggtgcccttgaagaacttcctaatccatgtacataaaatacatcatatgtacacttataaatgtatatagaatgctcaaaaataaaattcttaataatagaactggcaaaatatttgagtgtccactagatgagtatcagacctagtccttacccttagggggatgcagtcctggttgttatccaggatacacacctgtcagtataaggcagaagatgcctaagggccaagatggtttgcctcggaggagaatggaagagagagattgctgactggacattcagatgcaagactgggtcctgcttaaatcccaggattctgctggagggagctgatagtgatacttgtcccttctgtacattgcttcatgtagccttctcagcatccctaggagaaacttactattgtgactctcatgttggaggaggaaacggacacccaaggtagaggaacttgcaaaagggcagccggcaaactgtcaggggtggcctgagcctggcaatctgcctccagagtctgctctcggccattgtgctatgtgctacctggataggtcatacaggctcagcagtgggtggagagcagtgctcagatttgtccatctccacagaatgcagcacacacacaaatgtacaagttcttcccctaacctcagaggaataggggaattaactttgcttgcaatttggaacaatattatagatgttgatccaagtagttctgttactggctggtcctggatctctgccagaacacccgtcatcattgactggctaaatagagatcttggatataggccagaagcagtgaagtatataattggaaattgctcctgataataacttccttcttagccaaaaaccacacaaaacaaaaataatcccctccccacaggaatatgctttccaaattgtgtccaaaacattacctgctctgttatattgagaaggttagagacttcagagcatgcttagaaaaagcagtggtgccacaggtgagactccacactctgtcttgctggggctgaagcctccatcactttcccaggccaggttagtgctgggcttcttgctttccttctattcctgagagtagaactggctaagcccattccttccctcagtcagccccacttctctatagtgggttctgggggtggggggctgaattaccagtaaaactagaaagattgggaccaagtgcagtggcccacacctgtaaatcctagcgctttgaaaggaagaggcaggaggattgcttgaagtcaggagttcaagaccagcctgggcaaaatagaaccccatctttaaaaaaaaagtttaaaaattagccaggtacggaggtgtgtgcctgtaatcccagctactcagaaggctgaggtgggataatcacttgagcccaggagtttgaggctgcagtgagctgtgatcacactactgcattccagccaggacaacagagtgagatcctatctcttaaacaaaaaaaaaaactggcgagttcaataccaacttctacaatgaaatccccttccccccacaaccctgcttctcctaagtttccctcattacatggttgctgtgggctatgtgtgctgtggtctgaatgtttgtgtctaaaattcacatgttggtattaagagatagggcctttgggaggtgattaggttatgagggcagatccctcgtgaatgggattagtgctcttataaaagaggcctgaggaagcttgttcgttcctcttgcccttctgccatgtaaggatgcaatgagaaggcaccatctgtgagcaaggagcccctcac

SEQ ID NO: 411 - DNA, 2929 bp, Homo sapiens
gcggcttgttgataatatggcggctggagctgcctgggcatcccgaggaggcggtggggcccactcccggaagaagggtcccttttcgcgctagtgcagcggcccctctggacccggaagtccgggccggttgctgaatgaggggagccgggccctccccgcgccagtccccccgcaccctccgtcccgacccgggccccgccatgtccttcttccggcggaaagtgaaaggcaaagaacaagagaagacctcagatgtgaagtccattaaagcttcaatatccgtacattccccacaaaaaagcactaaaaatcatgccttgctggaggctgcaggaccaagtcatgttgcaatcaatgccatttctgccaacatggactccttttcaagtagcaggacagccacacttaagaagcagccaagccacatggaggccgctcattttggtgacctgggcagatcttgtctggactaccagactcaagagaccaaatcaagcctttctaagacccttgaacaagtcttgcacgacactattgtcctcccttacttcattcaattcatggaacttcggcgaatggagcatttggtgaaattttggttagaggctgaaagttttcattcaacaacttggtcgcgaataagagcacacagtctaaacacagtgaagcagagctcactggctgagcctgtctctccatctaaaaagcatgaaactacagcgtcttttttaactgattctcttgataagagattggaggattctggctcagcacagttgtttatgactcattcagaaggaattgacctgaataatagaactaacagcactcagaatcacttgctgctttcccaggaatgtgacagtgcccattctctccgtcttgaaatggccagagcaggaactcaccaagtttccatggaaacccaagaatcttcctctacacttacagtagccagtagaaatagtcccgcttctccactaaaagaattgtcaggaaaactaatgaaaagtatagaacaagatgcagtgaatacttttaccaaatatatatctccagatgctgctaaaccaataccaattacagaagcaatgagaaatgacatcatagcaaggatttgtggagaagatggacaggtggatcccaactgtttcgttttggcacagtccatagtctttagtgcaatggagcaagagcactttagtgagtttctgcgaagtcaccatttctgtaaataccagattgaagtgctgaccagtggaactgtttacctggctgacattctcttctgtgagtcagccctcttttatttctctgagtacatggaaaaagaggatgcagtgaatatcttacaattctggttggcagcagataacttccagtctcagcttgctgccaaaaagggccaatatgatggacaggaggcacagaatgatgccatgattttatatgacaagtacttctccctccaagccacacatcctcttggatttgatgatgttgtacgattagaaattgaatccaatatctgcagggaaggtgggccactccccaactgtttcacaactccattacgtcaggcctggacaaccatggagaaggtctttttgcctggctttttgtccagcaatctttattataaatatttgaatgatctcatccattcggttcgaggagatgaatttctgggcgggaacgtgtcgctgactgctcctggctctgttggccctcctgatgagtctcacccagggagttctgacagctctgcgtctcagtccagtgtgaaaaaagccagtattaaaatactgaaaaattttgatgaagcgataattgtggatgcggcaagtctggatccagaatctttatatcaacggacatatgccgggaagatgacatttggaagagtcagtgacttggggcaattcatccgagaatctgagcctgaacctgatgtaaggaaatcaaaaggatccatgttctcacaagctatgaagaaatgggtgcaaggaaatactgatgaggcccaggaagagctagcttggaagattgctaaaatgatagtcagtgacattatgcagcaggctcagtatgatcaaccgttagagaaatctacaaagttatgactcaaaacttgagataaaggaaatctgcttgtgaaaaataagagaacttttttcccttggttggattcttcaacacagccaatgaaaacagcactatatttctgatctgtcactgttgtttccaggagagaatgggagacaatcctagacttccaccataatgcagttacctgtaggcataattgatgcacatgatgttcacacagtgagagtcttaaagatacaaaatggtattgtttacattactagaaaattattagttttccaatggcaataacccatttatgagagtgttttagcctactggaatagacagggaccacatcctctgggaagcagataagcatagaactgatacttgatgcacactcgtagtggtaactcatccctaatcagcattgtaaagcaggtgccagaggtggtttgctttgtccttccaaagcaggtgagtcagccccaccgagagccaggcagctttgagtggcagcgtggtgctagcagcttcagcggaacagggtgagagttaattatgcagtcttcttgacagcggcattaatttggaaggaaactgacaagtcatgggtcaagtttcagtgacttcctccttcctctgatggcagtatatagttttcacattttaattcctcctcctgagatgcactatacttaaaaccattctctcccctgctaacagaagggtgtgaatctggtttactttgagcattaggatttgcccctttggaattctgcactccagttacttaactttcccttcagaatacatgtggaaaaaaaaaaaaaaa

SEQ ID NO: 412 - DNA, 4552 bp, Homo sapiens
cggggggggggcggtgtgaaaggtgaccctcatttcgtttggaagcggtaacacttcggggtcacatctcagtccagttcctccagaataggcgctgctgtccgccccttccctgccccacgaaagaacaggtagccccaatcttgagacacgctcctccaccttcgaaatcttctcggtcccggttccccaggactcagccttcacagaggccaacttcaggtccgccactatcccaggattcccgactcccggtttcctgtccttctcccctcccagctcctggcgcctgcgatagcggcaagatggcggaccgtggcggcgtgggtgaagccgcagctgttggagcgtctcctgcatctgtccctggcctaaacccgacgctaggctggagggagcgactgcgggccgggctggcggggactggggcctcgttgtggttcgtggcggggctggggctgctttacgccctgaggatccctttgaggctgtgtgagaatttggcagcggtgactgtatttttaaattcattgacacccaaattctatgtggcacttacagggacctcttcattgatatcaggactaatatttatatttgaatggtggtacttccataagcatggcacatcttttattgagcaagtatctgtaagccatttgcaaccactgatgggaggaacagagagcagcatttcagaaccaggttctccttcgaggaacagagaaaatgaaaccagcagacagaatttgtcagaatgtaaggtatggagaaaccctctaaatcttttcagaggagcagaatataggagatacacttgggtgactggtaaagagccacttacatactatgacatgaacctgtcagctcaggaccatcagacctttttcacctgtgacacagattttttacgtccttcagacacagttatgcagaaggcttggagggaaagaaatcctccagctcgaatcaaagcagcctatcaagctttagaattaaacaatgactgtgccactgcatatgttctactggctgaggaagaagcaacaactattgtagatgctgaaaggttatttaaacaggcactcaaggcaggagaaacaatttataggcagtcacagcagtgccagcaccaaagtcctcagcatgaagctcaactgaggagagataccaatgtactggtatatattaaaagaagattggcaatgtgtgcaagaaaattaggaagaataagagaagcagtaaaaataatgagagatttgatgaaagaatttcctcctcttaccatgttgaacatccatgaaaatctcttagaatcacttttagaattacaggcctatccagatgttcaggcagtcctagcaaaatatgatgatataagccttccaaagtcagcagcaatctgttacacagcagcactgttgaagacaaggactgtttcagaaaaattctctccagaaacagcctccagaagaggattaagcacagcagaaattaatgccgtggaagcaattcatagagctgtggaatttaatcctcatgttccaaaatatttattagagatgaaaagtttaattttacctccagaacacattctgaaacggggtgatagtgaagcaattgcctatgctttctttcatcttcagcactggaaacgaatagaaggtgctcttaatctgttacagtgtacatgggaaggcacttttagaatgattccatacccgttagagaaaggacatctattttacccttatcccagctgcacagagacggctgatagagagctattacctacctttcatcatgtttctgtttacccaaaaaaggagcttcctttgttcatccatttcacagcaggattttgctcttctacagcaatgatagccattctcactcaccagtttcctgaaatcatgggtatttttgctaaagctgtgctgggactctggtgcccccaaccctgggcatcctcaggctttgaggagaatacacaggatttgaagtcagaagacctaggtttgagttctggctgagccacgcactgttcatgtgaccttggacaaatcaccaaatttttctgaacagcatctgtaaagtgacagtaacccctacctcacagggttgttgtgaggattacatatatgctaaagcattttgcatatgaaaaagcttcttatgaatattgttattcctaggcaaaccccccttggaagctgtcaaaaaggacaactgtagatgaaattgtcttccttttttcttcattcagcttagcctttctgtttggccagggctacttacaggggctgttggggttgaagtcaagtcaccgcattttggctcctttggtcaaagagaaagaactctaatgtccagctgctccatcgatatactcatagaatggaagtgagcaaaggaaaattttaagccaggatagttaaccgttagggggccagtgggagaatgcttgccttgcatttgcacatccagaatgactaaaacatcttaagtaaatgaggaatagccaccgagatgctcagagataatataagccatgagtgggaagtgggaaaatgagtttgtcaacgccctctcttttctatccctttacctttgaggtcagggacagggcatattactgacaccccactggctattgccctatacctgccaatcacccaaagaaaataatagcttctgagaaagctcaattcactgtagcaactgtgatatatttaccctaataaagccaccacttggtcttttccagtgcttctctcttatggagatcatccctggaatccaaagctctccagttttctaacccagttaagagttaaaaacaaccacaggtcatgagcagtaggcttggcagttataccccatgcagtcataggagactgctccatcattctcagcacatagggtgcacatctcactatctctggcatgaaccagccttgcgaacttatacagtctcagccactctgctttgatggtaattcttcaccactgatctctcctcaccatgcccttcctgcatccttcccccaaccacccaccagaggagttctggtccccaaaccaaagagttgcctgcaggttggtaatgtgactttgtagatattccttgattaaagccagaccctattggtatcctttttgaagtactggatcgaaatctaattgcttttttttttaattgttggggagaggaggatgagcagaactcctatgcagcctgagagaagttctctatgtgtctgtatatgtacacctctgtgtgtgtgtgtgtaacctcatggttgtgctcaggctgacagggagggcaaagagtgaaaaggaagcatctctttcttgttatccaacattgcttcaaagatgcccaacccccgtagtagcaggcagttcccaagtggagggtcggggcagaggcctccaccaaggccatcaataaccaggtgtgagctacaggtctctgtgtaatgtgaagctctcccgtatttcatttctgcacccagggggcggctctgcaggattgcttacggagaactctgtgtctggcacctctctccacaaggcccaggcgcccagggtcccaccgacctgcccaggaatgcatcacattgttctctggtgctgtaatttggctgcaggagctaggctgaatgcctcccagggatgagaaacatactctccctggcgtcctcccttcgccccagctagcttgagcttctgccctatgaccactgagtgcatttaaataaaaacctcagaaagactgaggaaaaaaaaatcctaattatctctcttctgttaagccatgtagagactcgtgtcctgagtgggtctgagaatttggcaaagacttactggttggtgttcttgataagggaagtgagacaaaggagaagaaattactccctgcaacaggaggaatagaaatgaagcagtgagtgttcagaaattagatctacaagaagttttgcaaacagaccctcagggccaggcaatgtttgtttttgttttttgttttttgtttttttttttaatctgaagcccctgattttatttttccagcatcactctaaggaagagtgtggattagtgccattattcagggctggtattaataaaagttagcttttatctgcagggctaggttaaggctggcattcttacttttacattaaaaaaactggctacaggctgcgcagctgaggtacttcagtcatgtgccttctctaaaggattcttagatccttaaaatatatagtatgttttaagtttgtatctaaatagcacttactgtaatgtattatacctaaatgtttattaaaagttagaagaaatgagtaccaacaggaaggaatggaagagaggagaggggctaagacattgctgatctgagggacagacctctatcaaatagaagagggctgggagaaggggtgattagaagcagagtgagggaactaaatggagccctgactgcaccaaataaagttctcattttgctgcttgttccaaaaaaaaaaaaaaaaaaaaaaaaaaa

SEQ ID NO: 413 - DNA, 1233 bp, Homo sapiens
ggaggagtgcgggagcgcgccagagactggcgggcagctccgcccgcggccgggatgcactaggcaaagccagctgggctcctgagtccggtgggtacttggagaacttattacgtctagctggaggattgtaaatgcaccaatcagcatgctgtgtctagctcaagattttctccatccccttattttgggccagtggctgtcattacatatgagatgagtctcttgaagactacagatgagagcagtcatgatggcctgcactccacacaatgcaacagagtgaaggagcaggttctggttctttggtgtagtcctgaagcttcctaagaaagttcacatcaggtgatggataggagcaaccctgtaaaaccagccttagactatttttcaaacaggctggtgaattaccagatctccgtcaagtgcagtaaccagttcaagttggaagtgtgtcttttgaatgcagaaaacaaagtcgtggacaaccaggctgggacccagggccagctgaaggtgctgggtgccaacctctggtggccgtacctgatgcacgaacaccccgcctacctgtactcgtgggaggatggtgattgctcacaccaaagccttggacccctcccagcctgtgacctttgtgaccaactccacctacgcagcagacaagggggctctgtatgtggatgtgatccgtgtgaacagctactactcttggtatcgcaactacgggcacctggagttgattcagctgcagctggccgcccagtttgagaattggtgtaagacatcacaatcccattattcagagcgcgtatggagtggaaacgcttatagggtttcaccaggatccacctctgatgttcagtgaagagtaccagaaaagtctgctagagcagtaccatctgggtctggatcaaaaacgcagaaaatacgtggttggagagctcatctggaattttgccgatttcatgactaaccagtttctgcaggctggaaatccaagatgaagtcacctgtagttcagtgtctgcgtctaagagagcactttgttgctgcacccgccatagggaagaaatactgtatcttctcatgaaggaaggaaccgaaggtttacaagtattgtggctgaaggctgtgtctattcctgcttcctccacctcaccttgcaaaagtgtttatccaaataaatccctcacacatccaaaaaaaaaaaaaaaaaaaaaaaaaaaaaaa

SEQ ID NO: 414 - DNA, 4453 bp, Homo sapiens
gaccactgtgagcccgcggcgtgaggcgtgggaggaagcgcggctgctgtcgcccagcgccgccccgtcgtcgtctgccttcgcttcacggcgccgagccgcggtccgagcagaactggggctcccttgcatcttccagttacaaattcagtgccttctgcagtttccccagagctcctcaagaataacggaagggagaatatgacagatacctagcatctagcaaaataatggcagctgcttaccttgaccccaacttgaatcacacaccaaattcgagtactaagactcacctgggtactggtatggaacgttctcctggtgcaatggagcgagtattaaaggtctttcattattttgaaagcaatagtgagccaaccacctgggccagtattatcaggcatggagatgctactgatgtcaggggcatcattcagaagatagtggacagtcacaaagtaaagcatgtggcctgctatggattccgcctcagtcacctgcggtcagaggaggttcactggcttcacgtggatatgggcgtctccagtgtgagggagaagtatgagcttgctcacccaccagaggagtggaaatatgaattgagaattcgttatttgccaaaaggatttctaaaccagtttactgaagataagccaactttgaatttcttctatcaacaggtgaagagcgattatatgttagagatagctgatcaagtggaccaggaaattgctttgaagttgggttgtctagaaatacggcgatcatactgggagatgcggggcaatgcactagaaaagaagtctaactatgaagtattagaaaaagatgttggtttaaagcgattttttcctaagagtttactggattctgtcaaggccaaaacactaagaaaactgatccaacaaacatttagacaatttgccaaccttaatagagaagaaagtattctgaaattctttgagatcctgtctccagtctacagatttgataaggaatgcttcaagtgtgctcttggttcaagctggattatttcagtggaactggcaatcggcccagaagaaggaatcagttacctaacggacaagggctgcaatcccacacatcttgctgacttcactcaagtgcaaaccattcagtattcaaacagtgaagacaaggacagaaaaggaatgctacaactaaaaatagcaggtgcacccgagcctctgacagtgacggcaccatccctaaccattgcggagaatatggctgacctaatagatgggtactgccggctggtgaatggaacctcgcagtcatttatcatcagacctcagaaagaaggtgaacgggctttgccatcaataccaaagttggccaacagcgaaaagcaaggcatgcggacacacgccgtctctgtgtcagaaacagatgattatgctgagattatagatgaagaagatacttacaccatgccctcaaccagggattatgagattcaaagagaaagaatagaacttggacgatgtattggagaaggccaatttggagatgtacatcaaggcatttatatgagtccagagaatccagctttggcggttgcaattaaaacatgtaaaaactgtacttcggacagcgtgagagagaaatttcttcaagaagccttaacaatgcgtcagtttgaccatcctcatattgtgaagctgattggagtcatcacagagaatcctgtctggataatcatggagctgtgcacacttggagagctgaggtcatttttgcaagtaaggaaatacagtttggatctagcatctttgatcctgtatgcctatcagcttagtacagctcttgcatatctagagagcaaaagatttgtacacagggacattgctgctcggaatgttctggtgtcctcaaatgattgtgtaaaattaggagactttggattatcccgatatatggaagatagtacttactacaaagcttccaaaggaaaattgcctattaaatggatggctccagagtcaatcaattttcgacgttttacctcagctagtgacgtatggatgtttggtgtgtgtatgtgggagatactgatgcatggtgtgaagccttttcaaggagtgaagaacaatgatgtaatcggtcgaattgaaaatggggaaagattaccaatgcctccaaattgtcctcctaccctctacagccttatgacgaaatgctgggcctatgaccccagcaggcggcccaggtttactgaacttaaagctcagctcagcacaatcctggaggaagagaaggctcagcaagaagagcgcatgaggatggagtccagaagacaggccacagtgtcctgggactccggagggtctgatgaagcaccgcccaagcccagcagaccgggttatcccagtccgaggtccagcgaaggattttatcccagcccacagcacatggtacaaaccaatcattaccaggtttctggctaccctggttcacatggaatcacagccatggctggcagcatctatccaggtcaggcatctcttttggaccaaacagattcatggaatcatagacctcaggagatagcaatgtggcagcccaatgtggaggactctacagtattggacctgcgagggattgggcaagtgttgccaacccatctgatggaagagcgtctaatccgacagcaacaggaaatggaagaagatcagcgctggctggaaaaagaggaaagatttctgaaacctgatgtgagactctctcgaggcagtattgacagggaggatggaagtcttcagggtccgattggaaaccaacatatatatcagcctgtgggtaaaccagatcctgcagctccaccaaagaaaccgcctcgccctggagctcccggtcatctgggaagccttgccagcctcagcagccctgctgacagctacaacgagggtgtcaagcttcagccccaggaaatcagcccccctcctactgccaacctggaccggtcgaatgataaggtgtacgagaatgtgacgggcctggtgaaagctgtcatcgagatgtccagtaaaatccagccagccccaccagaggagtatgtccctatggtgaaggaagtcggcttggccctgaggacattattggccactgtggatgagaccattcccctcctaccagccagcacccaccgagagattgagatggcacagaagctattgaactctgacctgggtgagctcatcaacaagatgaaactggcccagcagtatgtcatgaccagcctccagcaagagtacaaaaagcaaatgctgactgctgctcacgccctggctgtggatgccaaaaacttactcgatgtcattgaccaagcaagactgaaaatgcttgggcagacgagaccacactgagcctcccctaggagcacgtcttgctaccctcttttgaagatgttctctagccttccaccagcagcgaggaattaaccctgtgtcctcagtcgccagcacttacagctccaacttttttgaatgaccatctggttgaaaaatctttctcatataagtttaaccacactttgatttgggttcattttttgttttgtttttttcaatcatgatattcagaaaaatccaggatccaaaatgtggcgtttttctaagaatgaaaattatatgtaagcttttaagcatcatgaagaacaatttatgttcacattaagatacgttctaaagggggatggccaaggggtgacatcttaattcctaaactaccttagctgcatagtggaagaggagagcatgaagcaaagaattccaggaaacccaagaggctgagaattcttttgtctaccatagaattattatccagactggaatttttgtttgttagaacacccttcagttgcaatatgctaatcccactttacaaagaatataaaagctatattttgaagacttgagttatttcagaaaaaactacagccctttttgtcttacctgccttttactttcgtgtggatatgtgaagcattgggtcgggaactagctgtagaacacaactaaaaactcatgtcttttttcacagaataatgtgccagttttttgtagcaatgttatttctcttggaagcagaaatgctttgtaccagagcacctccaaactgcattgaggagaagttccagaaccatcccctttttccatttttatataatttataaagaaagattaaagccatgttgactattttacagccactggagttaactaacccttccttgtatctgtcttcccaggagagaatgaagcaaaacaggaatttggttttcttttgatgtccagttacaccatccattctgttaattttgaaaaaatataccctccctttagtttgttgggggatataaattattctcaggaagaatataatgaactgtacagttactttgacctattaaaaaggtgttaccagtaaa

SEQ ID NO: 415 - DNA, 5217 bp, Homo sapiens; identical to SEQ ID NO: 380

SEQ ID NO: 416 - DNA, 1290 bp, Homo sapiens
gtgagcggcaacatggcgtccaggtctaagcggcgtgccgtggaaagtggggttccgcagccgccggatcccccagtccagcgcgacgaggaagaggaaaaagaagtcgaaaatgaggatgaagacgatgatgacagtgacaaggaaaaggatgaagaggacgaggtcattgacgaggaagtgaatattgaatttgaagcttattccctatcagataatgattatgacggaattaagaaattactgcagcagctttttctaaaggctcctgtgaacactgcagaactaacagatctcttaattcaacagaaccatattgggagtgtgattaagcaaacggatgtttcagaagacagcaatgatgatatggatgaagatgaggtttttggtttcataagccttttaaatttaactgaaagaaagggtacccagtgtgttgaacaaattcaagagttggttctacgcttctgtgagaagaactgtgaaaagagcatggttgaacagctggacaagtttttaaatgacaccaccaagcctgtgggccttctcctaagtgaaagattcattaatgtccctccacagatcgctctgcccatgtaccagcagcttcagaaagaactggcgggggcacacagaaccaataagccatgtgggaagtgctacttttaccttctgattagtaagacatttgtggaagcaggaaaaaacaattccaaaaagaaacctagcaacaaaaagaaagctgcgttaatgtttgcaaatgcagaggaagaatttttctatgaggagcagggaaaacctgaggtgcttggaggtccagacacaagaagaggattggaaccagttccgatacagcacaatggtggttcacgggggcaagtgacagccctggtttctctgaaggctggactaattcaatcaagatcaactctaagtgatttccagggaaccttcatgactgttggaattgctctgtcataataagtcagggatatttaggaggctcatagtctcctggagggataaaacatctcggcacctagtaatggtaaattagtcaatatttgttagtttcgtttgagatctcaaatgttaggattttctgaagtctcagtgtctttcagagtttgagataccttgttttcattttttctaatttttaatttaaaagtaataaagaatattttgtaatgattaggatgaaaattttatcgtcaattataagccaaaatttgctaaaattaaagtcagtatacttggaaaaaaaaaaaaaaaaaaaaaaaaaaaaaa

SEQ ID NO: 417 - DNA, 1889 bp, Homo sapiens
gcggcggcggcggcggcagcggcgggagcggcttctgcctcggctggagactgaggcgaaggcggcagcggcggaggaggtggaggagaggcgagggtgaaggcgatggcgacgcggggcacatgaggccgcgaccggcgggacgggccgaggcccggcggaggaggcggctccgggggaacccgccgccggagggaatctggaaaaattgcaatcaaaacatcatttctctaagaaaattttgggtaaccgaagttctggacaacagggcataccaattcaatcaccatgagttggagcttcctgactcgcctgctagaggagattcacaaccattccacatttgtggggaagatctggctcactgttctgattgtcttccggatcgtccttacagctgtaggaggagaatccatctattacgatgagcaaagcaaatttgtgtgcaacacagaacagccgggctgtgagaatgtctgttatgatgcgtttgcacctctctcccatgtacgcttctgggtgttccagatcatcctggtggcaactccctctgtgatgtacctgggctatgctatccacaagattgccaaaatggagcacggtgaagcagacaagaaggcagctcggagcaagccctatgcaatgcgctggaaacaacaccgggctctggaagaaacggaggaggacaacgaagaggatcctatgatgtatccagagatggagttagaaagtgataaggaaaataaagagcagagccaacccaaacctaagcatgatggccgacgacggattcgggaagatgggctcatgaaaatctatgtgctgcagttgctggcaaggaccgtgtttgaggtgggttttctgatagggcagtattttctgtatggcttccaagtccacccgttttatgtgtgcagcagacttccttgtcctcataagatagactgctttatttctagacccactgaaaagaccatcttccttctgataatgtatggtgttacaggcctttgcctcttgcttaacatttgggagatgcttcatttagggtttgggaccattcgagactcactaaacagtaaaaggagggaacttgaggatccgggtgcttataattatcctttcacttggaatacaccatctgctccccctggctataacattgctgtcaaaccagatcaaatccagtacaccgaactgtccaatgctaagatcgcctacaagcaaaacaaggccaacacagcccaggaacagcagtatggcagccatgaggagaacctcccagctgacctggaggctctgcagcgggagatcaggatggctcaggaacgcttggatctggcagttcaggcctacagtcaccaaaacaaccctcatggtccccgggagaagaaggccaaagtggggtccaaagctgggtccaacaaaagcactgccagtagcaaatcaggggatgggaagacctccgtctggatttaatcctggcgggcttaaaacctgtgcttttcatagtttatggtaagcagcagctcactgaataatgacttccattgagtaaacatttggctctggttatcttcagggatgctgttggctcatgatccaagctcaggggactctggaggcggggctgggctgagggagagaaagggaaacacagtgttcccaggcacatgttcttagcaataatacagttgcagaactttacatttgtgtcttccagatctggagaagaacagacatatttaaatcattcttgttgaacagtttttgtatgtacagtattatggtacttttttttttttagtatgagaactttttttgtatttgtacattgaactgctgtagttatacttttatattaaaggggaaaaagtccttataaataa

SEQ ID NO: 418 - DNA, 9390 bp, Homo sapiens; identical to SEQ ID NO: 250

SEQ ID NO: 419 - DNA, 3323 bp, Homo sapiens
aatctgccattttctgtccctgagtgagtctctggcgtcccaaattgcctgtttttctcgcaggctctattccgttcgctggttcgccacctcaggggaacgatggccatggagtccacagccactgccgccgtcgccgcggagctggtttctgccgacaaaattgaagatgttcctgctccttctacatctgcagataaagtggagagtctggatgtggatagtgaagctaagaaactattgggtttaggacagaaacatctggtgatgggggatattccagcagctgtcaatgcattccaggaagcagctagtcttttaggtaagaagtatggagagacagctaatgagtgtggagaagccttctttttctatgggaaatcacttctggagttggcaagaatggagaatggtgtgttgggaaacgccttggaaggtgtgcatgtggaagaggaagaaggagaaaaaacagaagatgaatctctggtagaaaataatgataacatagatgaggaagcaagggaagagttgagagaacaggtttatgacgccatgggagaaaaagaagaagccaaaaaaacagaagacaagtctttggcaaagcctgaaactgataaagaacaggacagtgaaatggagaagggtggaagagaagatatggatataagtaaatctgcagaggagccacaggaaaaagttgacttgactctagattggttaactgaaacctctgaagaggcaaaaggaggagcagcaccagaaggaccgaatgaagctgaggtcacttctgggaagccagaacaggaagtaccagatgctgaggaagaaaaatcagtttctggaactgatgtccaagaagagtgcagagaaaaaggaggtcaggagaagcagggagaggtaattgtgagcatagaggagaagccaaaagaagtttcagaagagcagcctgtggtgactctagaaaagcagggcactgcagtggaggtagaagcagagtctttagacccgacagtcaagccagtggatgtgggtggggacgagccagaggagaaggtagttacctctgaaaacgaggcaggaaaggcggttcttgaacaactggtaggtcaagaagtaccacctgctgaagagtcaccagaggtgacaacagaggctgcagaggcctcagctgtagaggctggatcagaagtctctgaaaagcctgggcaggaggctccagttctccctaaggatggtgcagtcaatggaccgtcagttgtaggagatcagactcctattgaaccacagacttctatagaaagactgacagaaacaaaagatggctcaggactagaggagaaggtcagggcaaagctggttcctagtcaggaggagactaagctgtctgtagaagagtctgaggcagctggagatggggttgataccaaggtagcccagggagctactgagaaatcacctgaagacaaagttcagatagctgctaatgaagagacacaagagagagaagaacagatgaaagagggtgaagaaactgaaggctcagaagaggatgataaagaaaatgataagaccgaagaaatgccaaatgattcagtccttgaaaacaagtctcttcaagaaaatgaggaggaggagattgggaacctagagcttgcctgggatatgctggatttagcaaagatcatttttaaaaggcaagaaacaaaagaagcacagctttatgctgcccaggcacatcttaaactcggagaagttagtgttgaatctgaaaactatgtgcaagctgtggaggagttccagtcctgccttaacctgcaggaacagtacctggaagcccacgaccgtctccttgcagagacccactaccagctgggcttggcttatgggtacaactctcagtatgatgaggcagtggcacagttcagcaaatctattgaagtcattgagaacagaatggctgtactaaacgagcaggtgaaggaggctgaaggatcgtctgctgaatacaagaaagaaattgaggaactaaaggaactgctacccgaaattagagagaagatagaagatgcaaaggagtctcagcgtagtgggaatgtagctgaactggctctgaaagctactctggtggagagttctacttcaggtttcactcctggtggaggaggctcttcagtctccatgattgccagtagaaagccaacagacggtgcttcctcatcaaattgtgtgactgatatttcccaccttgtcagaaagaagaggaaaccagaggaagagagtccccggaaagatgatgcaaagaaagccaaacaagagccggaggtgaacggaggcagtggggatgctgtccccagtggaaatgaagtttcggaaaacatggaggaggaggctgagaatcaggctgaaagccgggcagcagtggaggggacagtggaggctggagctacagttgaaagcactgcatgttaagagggggcacagccctcctcccaagggaaagtgtttttgtatataatgtattttttcacttttggaggattctttttgtataacttcaataaagattgtaagcaaaggttgaggctttgatggtttttttcttaattattggctgaatctgccttggagcactgctggttttatatattagccaaaggttttgttctggccttctgtactgatctgtgttcctgatcctaattcctatctgtctaacgtggaggtgatcaagtgtggctgtaggcctttgttttccaatggtgctatattctgttttcaaacacttcactgaacccagctgtcttgcaaactttcagtggtgctgtccctggatgggggctacaaaaacaagaattggtgaagatcttgctcttcagtgctgaaaatggatgatggactttggctgtgagccaggcctaggatggttcttgtcctatatccacctagtcttcacctggggctataattctgtcctggaaaaagaactctgaaaacctgggtcaggggaatgattcctaaggaaaacggtctgcatttgagctctggtttgaaagtagccaaggggactgatggtggacactccagatgtggttggaagcatatgtggggaggctggctggttgagttttgttattttctgtatagaaaggttgagatatatcaacacttggaattgttacccatctgcagaattgacttctcaaataaagatgctaaaaatctcaaaaaaaaaaaaaaaaaaaaaaaaaaaaaaaaaaaaaaaaaaaaaaaaaaaaaaaaaaaaaaaaaaaaaaaaaaaaaaaaaaaaaaaaaaaaaaaaaaaa

SEQ ID NO: 420 - DNA, 11479 bp, Homo sapiens
gagtcccaggattccggggactggagggcagcgccggcagccaaggattttgacacttcatgacatgtcattatttagagcaataatgaatattgacctgttttggattagttgatgaccttcggaaatgatccaataatatctactatagagaagctgaatatactccatttggagtgaacagcccggattgttacagaattttcaagatgacagatccaatgatggacttttttgatgatgccaatctttttggtgagaccttagaaggtttgtcagatgatgcatttgtacaaccaggacctgtttcactagttgatgaattgaatttgggtgcagaatttgaaccgttgcacatagattcactgaaccatgttcaaggtactccaacacatcagaagatgactgattttgaacagttaaatcaatttgattcaataaaatttcaccatgttaatcaatcttttggtagcccagctgaacatgtgttatctccacactctcagtttaattgttctccaatccatccccaaaaccaacccaatggtttgtttccagatgtatcagatggcagtccaatgtggggccatcagacagctactaccatttcaaatcaaaatggatctccttttcaccaacaaggacattcacactctatgcatcaaaataaaagctttgtggcacaccatgactttgccttatttcaggccaatgaacaacaaacacagtgtacttcactacgctcacaacaaaacagaaataatctcaacccagggcagaattctcttagccagtctaaaaattttatgaatgtttctggtccacatagagtcaatgttaaccacccaccacagatgactaatgcatctaattcacaacagtctatttcaatgcagcaattttctcaaacgtcaaatccttcagcacacttccacaagtgtagcagtcatcaagaaggaaattttaatggaccttccccaaatatgacttcttgttctgtcagtaattcacagcaattttcttcacattattccttttccagtaatcatatatcaccaaacagtctacttcagtcctctgcagttcttgcatctaatcatacaaatcagactttatctgattttactggaagtaattccttttcacctcatagaggaatcaagcaagaatctactcagcatatcctaaaccccaatacatcattgaattcaaataatttccaaatattgcattcatcacatcctcagggtaattatagcaattcaaaattatctcctgtgcacatgaacttcccagatcctgttgactcaggaactcaaatgggccatttcaatgatcatgtagaaactaatggcttttcatctttagaagagaatttacttcatcaagtggaatctcaaactgagccattcacaggacttgaccccgaggacctccttcaggagggtcttcttcctcactttgatgagtcaacattcggacaagataattcaagtcacattttagatcatgaccttgatcggcagtttacttcgcatctggtaacacggccttctgatatggctcagactcagttgcaaagtcaggctcggagttggcattcatcattttctaatcatcagcatttacatgacagaaatcacctatgtttacagcgacagcctccatcttccaagaagagcgatggttctgggacatatactaagttgcagaatacccaggtgagggtcatgtctgagaagaagcagagaaaaaaggtggaatcagaaagcaagcaagaaaaggctaatcgtataatatcagaggccatagcaaaagcaaaggagcgtggggaacgcaatattccacgagtaatgagccctgaaaactttcctactgcttcagttgaaggaaaagaggaaaagaaaggtagaaggatgaaatccaagccaaaggacaaagacagcaaaaaaacaaaaacatgttctaagttaaaagagaagacaaaaattggcaaactcattattacattgggtaagaaacaaaaaagaaagaatgagtcttcagatgaaatatctgatgcagaacagatgccacagcatacattaaaagatcaagactctcaaaaaagaagatcaaatcgacaaattaaaagaaaaaaatacgcagaagatatagaagggaagcaatctgaagaagaggttaaaggttctatgaaaataaaaaagaattcagctcctttacctggtgaacagcctttacaattgtttgtggagaatccgagtgaagaagatgctgcaattgtagacaaaattctatcttctagaaccgtaaaaaaggaaatatcacctggagtgatgattgatacagaagaattttttgtaaaatacaagaattactcctatcttcactgtgagtgggccacagaagagcagcttttgaaagataaaaggatccagcagaaaatcaaacgattcaaattgagacaagcacaaagagcacatttttttgcagacatggaagaagaaccatttaacccagactacgttgaagtagacagagtattagaagtctctttttgtgaagataaggatactggtgagcctgttatttactacttagtaaaatggtgctcattgccatatgaagatagtacttgggaactaaaagaagatgtagatcttgcaaaaatagaagagtttgaacaactgcaagcttcaaggcctgacacaagacgtttggaccgtcctccttctaatatttggaagaaaatagatcaatccagggactataaaaatggcaatcaactcagggaatatcaactggaaggactcaactggctcttgttcaattggtacaatagacgaaactgcatcttagcagatgaaatgggtcttggcaaaactattcaatcaattacattcctctatgaaatccttctgactggtataagaggacctttcctgattattgctccactttctactattgcaaactgggagagagaatttcgtacgtggactgatattaacgttgtggtttatcatgggagcctgattagcagacaaatgatacagcaatacgagatgtacttcagggattcacaggggcgtatcattcgaggagcttacagattccaagccatcatcaccacttttgaaatgattcttggaggctgtggagagcttaatgcaattgaatggcgatgtgtgattattgatgaagcacataggttaaaaaataaaaattgtaaactcttagagggcctgaaactcatgaatctggaacacaaggtgcttttgactggcacccctctccaaaatacagttgaagaactatttagtcttcttcactttcttgaacccttaaggtttccttctgaatcaacatttatgcaagaatttggggatctgaaaacagaggaacaggtacagaaacttcaggctatcctgaaaccaatgatgttgagacgattaaaagaagatgtggaaaagaagttggcacctaaagaagaaaccatcattgaagtagaacttactaatattcaaaagaaatactaccgggctatcttggaaaagaacttttcttttttatccaaaggagcaggacaaactaatgtacctaacttggtcaataccatgatggagctcaggaaatgttgtaatcatccatatcttataaaaggtgctgaggagaaaatacttggagaatttagagatacttacaatccagctgcttctgattttcatcttcaagcaatgatccagtctgctggtaaattggtccttattgataaattgcttcccaaaatgaaagccggaggtcataaagtgctcatcttctctcaaatggttcgttgccttgacattctggaggactatctcatacataaaagatacttatatgagcgaattgatggcagagtcagaggaaatcttcggcaagctgctatagatagatttagtaaacctgattcagatagatttgtttttctcctgtgtacccgagctggtgggttgggcatcaacttaactgcagctgatacatgtataatttttgattctgattggaatcctcagaatgatcttcaggcccaagctcgttgccacagaattggtcagaacaaagcagttaaagtctacagactggtaactcgtaactcatatgagagagagatgtttgaccgagccagtttgaaactgggcctagataaagctgtgttacagagcatgagtggaagagaaagtaatgttggtggtattcagcagctttccaaaaaggaaatagaagatctgcttcgaagaggtgcttatggtgctattatggaggaagaagatgaaggctctaaattctgcgaagaggatatcgatcagattttactacgtcgtacaaaaactattacaattgaatcagaaggacgtgggtcaacatttgccaaggcgagttttgtggcatctggaaaccggacagatatttctttagatgatcccaacttctggcaaaaatgggctaaaaaggcagaaatagatatagaggccatcagtggcagaaacagcttggttattgacactccaagaattaggaagcaaacaagaccttttagtgccacaaaagatgaattggctgaattatctgaagctgaaagtgaaggagatgaaaagcccaaactccggagaccctgtgaccgttccaatggctatggaagaactgaatgctttagagttgagaaaaacctgctagtttatgggtggggccgatggagagagattctatctcatggccgtttcaaaaggcagctaaatgaacacgatgtagagataatttgccgagctctcttagcatattgccttgttcactaccgaggagatgagaagattaaaggtttcatatgggatctcattactccaactgaagatggacagacacgagagctacagaatcatctaggcctatcagctcctgtacccaggggtcgaaaagggaagaaagtaaaaactcaaacaagctcatttgatatacaaaaagcagaatggcttcgaaaatataatcccgagcagctccttcaagatgaaggctacaaaaaacatataaaacaccactgtaataaggttttgcttcgtgtgagaatgctgtattatctaaagcaagaagttattggaaatgagtgtcagaaagtatttgatggagttgatgcaagtgacattgatgtttgggtaccagaaccagaccactcagaagttcctgctgagtggtgggattttgatgctgataagtcactccttattggagtttttaaacatggatatgaaaaatataacactattcgagcagacccagcattatgcttcttggaaagagtgggaaaacctgatgagaaagcagttgctgctgaacagagagcgaatgattatatggatggggatgtggaagatccagaatacaaacctgccccagccatctttaaagatgatatagaggatgatgtttcctcaccaggagatcttgttatagcagatggagatggtcaactgatggagggtgataaagtatattggcctactcaatcagctttaaccacacgtttgaggcgtctcatcactgcataccagcgtactaataaaaacagacaaattcagcagatacaaccgactttctcggtgcctaccagtgtaatgcagcctatttatgaggaagccactcttaatcctaaaatggcagccaagatagaaagacagcaaagatggacaagaagagaagaagctgacttttatagggttgtatctacatttggagtggtttttgaccctgacagaggccaatttgattggacaaaatttagagctatggctaggctacataagaaaactgatgatagtttggaaaaatatttgtacgcattcatgtccatgtgtcggagggtttgtcgtcttccttccaaagaagaattggtggatccaaatatttttatccagcccatcacagaagaacgtgcttctaggactttgtatcgcattgaacttctaaggaaagtacgggaacaggcccttcgacatccacagttgtttgaacgcttgaagctttgccatccaaatccagatttaccagtctggtgggaatgtggccctcatgatagggatttgcttattggtgctgccaaacacggggtgagccgaacagactatcacattcttcgtgatcctgaactctcatttatggcagctcagaggaactacagtcaaagtaagatggctcattcaaggacttctaccccacttctacagcaatatcaagtagcactttctgcttctcctcttacctctctacctaggctcctagatgctaaaggtattattctagaggagatgaaagttaaaagtgaaaaccttaaagaggagcctcagtcttctgaagaagaatctatgtcttctgtggaaaccaggacactaataaaatctgagcctgtaagtccaaagaatggtgttttaccacaggctactggagaccagaaatctggtggaaaatgtgaaacagacagacgcatggttgcagccagaacagaacccctaactccaaacccagcttctaagaaaccaagagtccacaaaaggggatcagaatctagttctgattctgactcagattctgagagatcatcttgttcttccagatcatcttcttcctcatcatcctcttcttgctcccactctcgatcaggctctagttcttcttcatcttcatcttgttcttcagcatcttcttcatcctcttcctccacctcttcctcctcctcctcctcttcatcttcatcagaagaaagtgacagtgatgaagaagaagcccaaaaacgagaaagtactactcacatgaaagcctatgatgaagaaagcgtcgcgtcactgagcactacccaggatgagactcaggatagttttcagatgaacaatgggacaccagagtctgcttatatcttacaaggtggatatatgctggcagcctcgtattggccaaaggatcgtgtgatgatcaataggttggacagtatttgtcaaacagttctgaaaggaaagtggccttcagctagaagaagttatgatgctaacacagtggcttctttctataccacaaaactgctggacagccctggagcagctacagaatacagcgatcccagtgtacccactcccccaggtgccggtgttaaagaagaacatgatcagtcaacacagatgtcaaaggaaggtggtttgaagttgacatttcagaagcaagggcttgctcagaaaagaccatttgatggtgaagacggtgctctggggcagcagcagtacctcactcggcttcgagagcttcaaagtgcatcagagaccagcctcgtcaatttcccaaaatccataccagtatcaggtacttccattcaaccaacccttggtgccaatggtgtgatattagacaaccagcctatagtcaaaaaaaggcgaggaaggaggaagaatgtagaaggtgttgacatcttcttttttaacagaaataaaccacctaatcatgtttctttaggcttaacctcctcacagatttccacagggataaatccagcactatcctatactcaacctcaaggaattcctgatacagaaagtccagttccagttattaatcttaaagatggaacgagacttgcaggagatgatgcaccaaagagaaaggatttggaaaaatggcttaaggagcacccgggttatgtggaagatttgggagcttttattcctagaatgcagcttcatgagggaagacccaaacaaaaaagacaccgttgcagaaaccccaataaactagatgtgaatagtctcactggagaagaacgtgttcaactgattaacagaagaaatgctagaaaggttggaggtgcatttgctccccctttgaaagatttatgtagattcctaaaagaaaattcagaatatggagtagctcctgaatggggagatgttgttaagcaatctggatttcttccagaaagcatgtatgaacgtattctcactggtcccgttgtgagagaggaagtaagcaggcgggggagacggcctaaaagtggaattgcaaaggccacagcagcagcagctgctgcatctgccaccagtgtttcaggcaatcctttgttagccaatggactacttccaggtgtggatctcacaactcttcaggccttacaacaaaacctacaaaacttgcagtcactgcaagtaactgctgggttgatgggaatgcctaccggccttccttctggaggagaagctaaaaacatggctgctatgttccccatgctgctgtcaggaatggctggattaccaaatctgttgggcatgggaggactcctgacaaagcctacggaatctgggacagaagacaaaaagggaagtgactctaaggagtcagaaggaaaaacagaaaggacagagagccaaagttcagagaatggtggagaaaactctgtgtcaagttctccttccacatcctctactgctgcattaaatacagctgcagctgccaacccattagctcttaacccactattactatctaatatactttatccagggatgcttctcactccaggccttaatcttcatattccaactttgtcccagtccaatacttttgatgtacaaaacaaaaacagtgacttaggctcgtctaagtctgtagaagtaaaagaagaagattccagaattaaagatcaggaagacaaaggaggaactgaaccaagtcctctcaatgaaaacagcacagatgagggttcagagaaagctgatgcttcatctggatctgatagtacatcgtcgtcatctgaggattcagattctagtaatgaagactgattcccagactctgcacttaaaatatgaactgattttggattttttctttaataattaattgtaaataccccagtgttgagtgcatcaataacttactgaccgaacatttcagttatttgtttagaagtgcaaactgctttcagagactttttgcatgtaatatttcttaagattcataagtttctgaactcgtatgtactatcaaatacataaaggtgtaaaattacaacaaaaggcattataattttgttgggggttaattttatgaaaattatgctcaataagagttgtatatttaatatatttgcagtgaacacagaatactttatgcatattactgatttaatttgaatatagttttacagcctccttgacacctataatttacagatcaaaactcagcaataatttgggcagctaatgaatgtcatgaaagctgtagaatctacatcaccatccattgctttaattacatgaaaatgctctagtgttgtgatgcactgctgatgtttccaattcaggtacaagtatgttttaaagaagaaataagtttcccaatcagccaatttaactggctacctgttacctcagctgagttagtttaggaagtttacattcgtttctaattctatacttgttttcaggggttttttaaacacatcctatatatcatgtcaatctggcaagaaatatgacttgctttttgctgagcttaattcagatatcagtaaaattaagtcataaaataatcatgtgtcatgtgactttggcaccctatagacatacttagttttaacttttcaaagtttggcctcctattagaaataatcatgtctcagatgagtaatgtctgtttccagggttcagaaaaggcaaactcatgaaatgccactgaaaagaactttcaacacagcatacttcatgtaaaagaaattgtttgtttgctttctttgtgtagatttctatttgtgttttatgtcatggaaatattccagaattaacagataatagtggtaaagtaatatgcagatagtctaaattcattttgagtttctaggtgtaagcagactaaatgttgcccagaatcagtgttgggttatcagtttatattaaatatactgagttgcccgttttgaaaatgcactttgaataatctcaaaaagatgtacaagttatacctgtaaaccacaaaagtgaagcctgaggcttctgttcaatttcatagactcctttaccatgtaaaatttgtctgatatttgatttgtgatacaatttctcctgctaaagctgctattattctgacaaggtagaggtccaggttcacctttatatatatttaaaacaattagtactgaattggacataaaaatattgacattctaaggagagatatatgttagcatttttctggtactcaaataagttagtagtaaagtctgcaagggcataaatttagggggaaaaagtgtcccagttctctcctacagaaaaaatactttcagtatgttttgataaaactgttgctttgtcatgagttagtcaattgtatcaggttttccaagacctttaccagtaaattatgtttctgtatgtaaaataaccccttattagagagacagtgttatatgtatttacaaaattatataagttccattgggattgtattgattttgtattttcccaaaatagtactttgaattgatagtcctttatgcaatgtcttagcaatagtctctataatgcccatccaggagaagtgggtagtaattcttcatcatgaaaatgatatattacatatttagtatcttccctttgcagtattgcacttttgtttaactagaatacacctatgagatagccaaagtttcaaacacagttatcttagtttaccggtggagtatttcaacaccaaccacatttcccttcctccctctaattctacccacatgatctttattccttcctttcgccaattaaaaaaaaaaaaaaggaaaaaaaatctgtagatcttgtcactaaaatctaatttatatcaaatttatgagagaaagtattttcctaattatggtcaaataaatttggttaacatcctagtgattctctttctatataataaggcaattacagttttcaaagcattaagtctaacataactttaaacattctcttaggtttcaagacacttctatttaatattcattggggaaaagttgtccagctatcagctaagaaaacacatgcaaatatggttgtgtaaagttaagggttataaggaaaaaaaaatcagtagaattacataatactaaagttgcagttgaaagaatatccaagtatgtgttggtagttactaaaagaattatagctgttattgccttgtatttatagcccttgtttcaggttttatgattcaagtcttagtccaatctttcttttggacatttgcaatatttaccagttgtgttttgtgtagtctgaatttgctttctgtagttgagcaaacgtcttaaaaagtcatttgtaatttattaaattactttctatgatgttctatagagcaaatggaagtttaattattttttattaaacatattctttgactacccatgaaaaaaaaaaaaaaaaaa

SEQ ID NO: 421 - DNA, 3897 bp, Homo sapiens
cagtttgcaaaagccagaggtgcaagaagcagcgactgcagcagcagcagcagcagcggcggtggcagcagcagcagcagcggcggcagcagcagcagcagcggaggcaccggtggcagcagcagcatcaccagcaacaacaacaaaaaaaaatcctcatcaaatcctcacctaagctttcagtgtatccagatccacatcttcactcaagccaggagagggaaagaggaaaggggggcaggaaaaaaaaaaaacccaacaacttagcggaaacttctcagagaatgctccaaaactcagcagtgcttctggtgctggtgatcagtgcttctgcaacccatgaggcggagcagaatgactctgtgagccccaggaaatcccgagtggcggctcaaaactcagctgaagtggttcgttgcctcaacagtgctctacaggtcggctgcggggcttttgcatgcctggaaaactccacctgtgacacagatgggatgtatgacatctgtaaatccttcttgtacagcgctgctaaatttgacactcagggaaaagcattcgtcaaagagagcttaaaatgcatcgccaacggggtcacctccaaggtcttcctcgccattcggaggtgctccactttccaaaggatgattgctgaggtgcaggaagagtgctacagcaagctgaatgtgtgcagcatcgccaagcggaaccctgaagccatcactgaggtcgtccagctgcccaatcacttctccaacagatactataacagacttgtccgaagcctgctggaatgtgatgaagacacagtcagcacaatcagagacagcctgatggagaaaattgggcctaacatggccagcctcttccacatcctgcagacagaccactgtgcccaaacacacccacgagctgacttcaacaggagacgcaccaatgagccgcagaagctgaaagtcctcctcaggaacctccgaggtgaggaggactctccctcccacatcaaacgcacatcccatgagagtgcataaccagggagaggttattcacaacctcaccaaactagtatcattttaggggtgttgacacaccagttttgagtgtactgtgcctggtttgatttttttaaagtagttcctattttctatcccccttaaagaaaattgcatgaaactaggcttctgtaatcaatatcccaacattctgcaatggcagcattcccaccaacaaaatccatgtgaccattctgcctctcctcaggagaaagtaccctcttttaccaacttcctctgccatgtttttcccctgctcccctgagaccacccccaaacacaaaacattcatgtaactctccagccattgtaatttgaagatgtggatccctttagaacggttgccccagtagagttagctgataaggaaactttatttaaatgcatgtcttaaatgctcataaagatgttaaatggaattcgtgttatgaatctgtgctggccatggacgaatatgaatgtcacatttgaattcttgatctctaatgagctagtgtcttatggtcttgatcctccaatgtctaattttctttccgacacatttaccaaattgcttgagcctggctgtccaaccagactttgagcctgcatcttcttgcatctaatgaaaaacaaaaagctaacatctttacgtactgtaactgctcagagctttaaaagtatctttaacaattgtcttaaaaccagagaatcttaaggtctaactgtggaatataaatagctgaaaactaatgtactgtacataaattccagaggactctgcttaaacaaagcagtatataataactttattgcatatagatttagttttgtaacttagctttatttttcttttcctgggaatggaataactatctcacttccagatatccacataaatgctccttgtggccttttttataactaagggggtagaagtagttttaattcaacatcaaaacttaagatgggcctgtatgagacaggaaaaaccaacaggtttatctgaaggaccccaggtaagatgttaatctcccagcccacctcaacccagaggctactcttgacttagacctatactgaaagatctctgtcacatccaactggaaattccaggaaccaaaaagagcatccctatgggcttggaccacttacagtgtgataaggcctactatacattaggaagtggcagttctttactcgtcccctttcatcggtgcctggtactctggcaaatgatgatggggtgggagactttccattaaatcaatcaggaatgagtcaatcagcctttaggtctttagtccgggggacttggggctgagagagtataaataaccctgggctgtccagccttaatagacttctcttacattttcgtcctgtagcacgctgcctgccaaagtagtcctggcagctggaccatctctgtaggatcgtaaaaaaatagaaaaaaagaaaaaaaaaagaaagaaagagggaaaaagagctggtggtttgatcatttctgccatgatgtttacaagatggcgaccaccaaagtcaaacgactaacctatctatgaacaacagtagtttctcagggtcactgtccttgaacccaacagtcccttatgagcgtcactgcccaccaaaggtcaatgtcaagagaggaagagagggaggaggggtaggactgcaggggccactccaaactcgcttaggtagaaactattggtgcttgactctcactaggctaaactcaagatttgaccaaatcgagtgatagggatcctggtgggaggagagagggcacatctccagaaaaatgaaaagcaatacaactttaccataaagcctttaaaaccagtaacgtgctgctcaaggaccaagagcaattgcagcagacccagcagcagcagcagcagcacaaacattgctgcctttgtccccacacagcctctaagcgtgctgacatcagattgttaagggcatttttatactcagaactgtcccatccccaggtccccaaacttatggacactgccttagcctcttggaaatcaggtagaccatattctaagttagactcttcccctccctcccacacttcccacccccaggcaaggctgacttctctgaatcagaaaagctattaaagtttgtgtgttgtgtccattttgcaaacccaactaagccaggaccccaatgcgacaagtagttcatgagtattcctagcaaatttctctctttcttcagttcagtagatttccttttttcttttctttttttttttttttttttttggctgtgacctcttcaaaccgtggtacccccccttttctccccacgatgatatctatatatgtatctacaatacatatatctacacatacagaaagaagcagttctcacaatgttgctagttttttgcttctctttcccccaccctactccctccaattcccccttaaacttccaaagcttcgtcttgtgtttgctgcagagtgattcgggggctgacctagaccagtttgcatgattcttctcttgtgatttggttgcactttagacatttttgtgccattatatttgcattatgtatttataatttaaatgatatttaggtttttggctgagtactggaataaacagtgagcatatctggtatatgtcattatttattgttaaattacatttttaagctccatgtgcatataaaggttatgaaacatatcatggtaatgacagatgcaagttattttatttgcttatttttataattaaagatgccatagcataatatgaagcctttggtgaattccttctaagataaaaataataataaagtgttacgttttattggtttcaaaaaaaaaaaaaaaaaaaa

SEQ ID NO: 422 - DNA, 1162 bp, Homo sapiens
gcggccgcagggccatgctagccttgcgcgtggcgcgcggctcgtggggggccctgcgcggcgccgcttgggctccgggaacgcggccgagtaagcgacgcgcctgctgggccctgctgccgcccgtgccctgctgcttgggctgcctggccgaacgctggaggctgcgtccggccgctcttggcttgcggctgcccgggatcggccagcggaaccactgttcgggcgcggggaaggcggctcccaggccagcggccggagcgggcgccgctgccgaagccccgggcggccagtggggcccggcgagcacccccagcctgtatgaaaacccatggacaatcccgaatatgttgtcaatgacgagaattggcttggccccagttctgggctatttgattattgaagaagattttaatattgcactaggagtttttgctttagctggactaacagatttgttggatggatttattgctcgaaactgggccaatcaaagatcagctttgggaagtgctcttgatccacttgctgataaaatacttatcagtatcttatatgttagcttgacctatgcagatcttattccagttccacttacttacatgatcatttcgagagatgtaatgttgattgctgctgttttttatgtcagataccgaactcttccaacaccacgaacacttgccaagtatttcaatccttgctatgccactgctaggttaaaaccaacattcatcagcaaggtgaatacagcagtccagttaatcttggtggcagcttctttggcagctccagttttcaactatgctgacagcatttatcttcagatactatggtgttttacagctttcaccacagctgcatcagcttatagttactatcattatggccggaagactgttcaggtgataaaagactgatgaaagtcatccctcactgttagtaaggaagcagtatacatcaatgggaacagggcccatggaaatgtacaggagtttccctattttggtgttcagcttgaaaaaggacttgtcagaatcaactgtgtcatcaaaatttaagtaatgtgcattgaaaataaggttgatcatgggaatatgcagaatttccaatgtatttttaaatacaaataaaattgtaatttagaatttttaaaaaaaaa

SEQ ID NO: 423 - DNA, 3889 bp, Homo sapiens
aaaaactcagggaagcccagggcccgtgttgtgcttttggcccaggtaggtggacagacatgtcccaggcgggggacgtagaaggccccagcacaggagaccctgtgctcagtccccaacacaactgtgagcttttacagaacatggaaggagccagctccatgccaggcctgtcaccagatgggccgggagcaagctctgggcccggagtcagggctggcagcagaaggaagatccccaggaaggaggcccttcgaggtggcagctcccgggctgcaggtgctgctgaggtccggccaggggtcttggagctgctagctgtggtacagagccggggctcgatgctggctcctgggctccacatgcagctgccctcggtgcctactcaggggagagctctgacctccaagaggctccaggtttctctgtgtgacatcttagatgacagttgccccaggaaactttgtagcaggtctgctggcctcccagagagagctctggcctgcagggagaggcttgcaggagtggaggaggtgagctgcctcaggcccagggaggccagagacggtggaatgagttctccagggtgtgacagaagaagccccacactcagcaaagaggagccccctggaaggcccctgacatcctcaccagacccagtccctgtgagggtaagaaagaaatggaggaggcaaggggctcattcagagtgtgaggaaggggctggtgacttcctgtggcttgatcagagccctcgtggggacaacctcctgtctgtgggagaccctccccaagttgctgacctggagtccttgggaggcccttgcagacctccctctccaaaagacactgggtctgggcctggagagccaggtggaagtggggcaggatgtgcctcagggactgagaaatttggatatttgcccgctacaggggatgggccccagccaggcagcccctgtggccctgtcgggttcccagtgcccagtggaggggagtccctcagttcagctgcacaggctcctccacagagcgcagcactgtgcctgggggcgtcagcacaggcctctgcagagcagcaagaagctgtgtgtgtcgtgcggactggcagcgatgaaggccaggctccagcacaggaccaggaggagctggaggccaaggctcagccagcttccaggggaaggctggagcaaggactcgctgcccccgctgacacctgtgccagctcccgggagcccttgggcggcctcagctcctccctggatactgaagccagcagggcctgctcaggcccattcatggagcagagaagatccaagggcactaagaacctgaagaaaggtccagtgccctgtgcccaagaccggggcacagacagaagctcagacaactcccaccaggacaggccagaggaacccagcccaggaggctgccccagactggaggaagtgaaaataccccatggagtgaagcttgtgtgctacctgggttccgggccagtgatccagctcctgggggccatcagccacggccaggcaggggggcagctgccaccaaagctggaggttctagaggacttgatggaggtcagctcaccctcacctgcccagaggctcagaaggaagaaaaggcccatggtgcagggccctgctgggtgccaggttttccagccttctccttcaggaggcacagcaggggaccctggtggcctctctgaccccttctaccctccaagaagcggttccctggcccttggcgaccccagctcggaccctgcatgttcccagagtggcccaatggaggctgaagaggattctcttccggagcagccagaggactcagctcagctccaacaggagaagccatccctgtatattggggtgcggggcactgttgtccgttccatgcaggaggtactatggactcgccttcgggagctcccagacccagtgctgagtgaggaggtggtggagggcattgctgctggcattgaggcagccctctgggacctgacacaaggcaccaatggccggtacaagaccaagtatcgcagcctgctgttcaacctgcgggaccccaggaacctggacttgtttctcaaagtggttcatggagatgtcaccccctacgacctggtgcggatgagctcgatgcagctggccccccaggagctggcccgctggcgggaccaggaggagaaaaggggcctgaatatcattgagcagcaacagaaggagccgtgcagacttccagcctccaaaatgacccacaagggcgaagtggagattcagcgggacatggaccagacactgaccctggaggatctggtgggaccgcagatgttcatggactgcagcccacaggccctgcccatcgcatcagaggacaccacggggcagcatgaccaccacttcttagaccccaactgccacatctgcaaggactgggagccctcgaatgagctgctaggctccttcgaagccgccaagagctgcggggacaatatcttccagaaagccctaagccaaactcctatgcctgctccagagatgcccaaaaccagggagttgtctcccacggaaccacaggacagggtccctccatctgggctccatgtgcctgctgcacccacaaaggccctgccctgcctgccaccctgggaaggtgttctggacatgttctccatcaagcggttccgggccagggcccagctggtctcgggacacagctgtcggcttgtccaggctctgcccaccgtgatccgctcggcaggctgcatcccctccaacattgtctgggaccttctggccagcatctgcccagccaaggccaaggacgtctgcgtggtcagactgtgcccacatggggcccgggacacccagaactgccgcctgctctactcatacctcaatgataggcagcgccacgggctggcctctgtggagcacatggggatggtcctgctgcccctgcctgccttccagcccctgcccaccaggctgcgccctttggggggcccaggcctttgggctcttcctgtctcccctctcctttccccaggtctggaggtcactcactcaagtctgttgctggctgtgctgctccccaaggaagggcttccagacacagcagggtccagcccctggttggggaaggttcaaaagatggtctccttcaacagtaaggtggagaagagatactatcagccagatgacaggaggccgaatgtgcccctgaagggcacccctcccccaggaggtgcctggcagcagagccagggcaggggcagtatagctccaaggggaatctctgcttggcagaggccccccagaggcagggggaggctctggccagagcctgaaaactggcagcatcctgggcgagggcagtggcccccagagccaggcttgcgccagtcccagcatccctattcagtagcaccagctggtcatggctttggccgtggccagcacttccacagggactcctgtccccaccaagccctgctccggcacctcgaatccctggcgaccatgagtcaccagctccaagccttactgtgcccccagaccaagagctccatcccccgccctctgcagcgtttgtctagcgcccttgcagctccagagccccctggcccagcccgtgactcctctttggggcctacagatgaagctggctctgagtgtcccttccctagaaaggcctgaccctccttacccaccagaacaggggttttgatgccctcactagtgttgaagcctgttccagagagaggtgggactgcaaggagaggatggtcagccctacccacctgccctgtttgagcttcctgtttgacaatgtttgctgttgattttttgttcaataaagaatttggtaaaattgg

SEQ ID NO: 424 - DNA, 4702 bp, Homo sapiens
acccccgagaaagcaacccagcgcgccgcccgctcctcacgtgtccctcccggccccggggccacctcacgttctgcttccgtctgacccctccgacttccggtaaagagtccctatccgcacctccgctcccacccggcgcctcggcgcgcccgccctccgatgcgctcagcggccgcagctcctcggagtcccgcggtggccaccgagtctcgccgcttcgccgcagccaggtggcccgggtggcgctcgctccagcggccggcgcggcggagcgggcggggcggcggtggcgcggccccgggaccgtatccctccgccgcccctcccccgcccggccccggcccccctccctcccggcagagctcgcctccctccgcctcagactgttttggtagcaacggcaacggcggcggcgcgtttcggcccggctcccggcggctccttggtctcggcgggcctccccgccccttcgtcgtcgtccttctccccctcgccagcccgggcgcccctccggccgcgccaacccgcgcctccccgctcggcgcccgtgcgtccccgccgcgttccggcgtctccttggcgcgcccggctcccggctgtccccgcccggcgtgcgagccggtgtatgggcccctcaccatgtcgctgaagccccagcagcagcagcagcagcagcagcagcagcagcagcagcaacagcagcagcagcagcagcagcagcagccgccgcccgcggctgccaatgtccgcaagcccggcggcagcggccttctagcgtcgcccgccgccgcgccttcgccgtcctcgtcctcggtctcctcgtcctcggccacggctccctcctcggtggtcgcggcgacctccggcggcgggaggcccggcctgggcagaggtcgaaacagtaacaaaggactgcctcagtctacgatttcttttgatggaatctatgcaaatatgaggatggttcatatacttacatcagttgttggctccaaatgtgaagtacaagtgaaaaatggaggtatatatgaaggagtttttaaaacttacagtccgaagtgtgatttggtacttgatgccgcacatgagaaaagtacagaatccagttcggggccgaaacgtgaagaaataatggagagtattttgttcaaatgttcagactttgttgtggtacagtttaaagatatggactccagttatgcaaaaagagatgcttttactgactctgctatcagtgctaaagtgaatggcgaacacaaagagaaggacctggagccctgggatgcaggtgaactcacagccaatgaggaacttgaggctttggaaaatgacgtatctaatggatgggatcccaatgatatgtttcgatataatgaagaaaattatggtgtagtgtctacgtatgatagcagtttatcttcgtatacagtgcccttagaaagagataactcagaagaatttttaaaacgggaagcaagggcaaaccagttagcagaagaaattgagtcaagtgcccagtacaaagctcgagtggccctggaaaatgatgataggagtgaggaagaaaaatacacagcagttcagagaaattccagtgaacgtgaggggcacagcataaacactagggaaaataaatatattcctcctggacaaagaaatagagaagtcatatcctggggaagtgggagacagaattcaccgcgtatgggccagcctggatcgggctccatgccatcaagatccacttctcacacttcagatttcaacccgaattctggttcagaccaaagagtagttaatggaggtgttccctggccatcgccttgcccatctccttcctctcgcccaccttctcgctaccagtcaggtcccaactctcttccacctcgggcagccacccctacacggccgccctccaggcccccctcgcggccatccagacccccgtctcacccctctgctcatggttctccagctcctgtctctactatgcctaaacgcatgtcttcagaagggcctccaaggatgtccccaaaggcccagcgacatcctcgaaatcacagagtttctgctgggaggggttccatatccagtggcctagaatttgtatcccacaacccacccagtgaagcagctactcctccagtagcaaggaccagtccctcggggggaacgtggtcatcagtggtcagtggggttccaagattatcccctaaaactcatagacccaggtctcccagacagaacagtattggaaatacccccagtgggccagttcttgcttctccccaagctggtattattccaactgaagctgttgccatgcctattccagctgcatctcctacgcctgctagtcctgcatcgaacagagctgttaccccttctagtgaggctaaagattccaggcttcaagatcagaggcagaactctcctgcagggaataaagaaaatattaaacccaatgaaacatcacctagcttctcaaaagctgaaaacaaaggtatatcaccagttgtttctgaacatagaaaacagattgatgatttaaagaaatttaagaatgattttaggttacagccaagttctacttctgaatctatggatcaactactaaacaaaaatagagagggagaaaaatcaagagatttgatcaaagacaaaattgaaccaagtgctaaggattctttcattgaaaatagcagcagcaactgtaccagtggcagcagcaagccgaatagccccagcatttccccttcaatacttagtaacacggagcacaagaggggacctgaggtcacttcccaaggggttcagacttccagcccagcatgtaaacaagagaaagacgataaggaagagaagaaagacgcagctgagcaagttaggaaatcaacattgaatcccaatgcaaaggagttcaacccacgttccttctctcagccaaagccttctactaccccaacttcacctcggcctcaagcacaacctagcccatctatggtgggtcatcaacagccaactccagtttatactcagcctgtttgttttgcaccaaatatgatgtatccagtcccagtgagcccaggcgtgcaacctttatacccaatacctatgacgcccatgccagtgaatcaagccaagacatatagagcagtaccaaatatgccccaacagcggcaagaccagcatcatcagagtgccatgatgcacccagcgtcagcagcgggcccaccgattgcagccaccccaccagcttactccacgcaatatgttgcctacagtcctcagcagttcccaaatcagccccttgttcagcatgtgccacattatcagtctcagcatcctcatgtctatagtcctgtaatacagggtaatgctagaatgatggcaccaccaacacacgcccagcctggtttagtatcttcttcagcaactcagtacggggctcatgagcagacgcatgcgatgtatgcatgtcccaaattaccatacaacaaggagacaagcccttctttctactttgccatttccacgggctcccttgctcagcagtatgcgcaccctaacgctaccctgcacccacatactccacaccctcagccttcagctacccccactggacagcagcaaagccaacatggtggaagtcatcctgcacccagtcctgttcagcaccatcagcaccaggccgcccaggctctccatctggccagtccacagcagcagtcagccatttaccacgcggggcttgcgccaactccaccctccatgacacctgcctccaacacgcagtcgccacagaatagtttcccagcagcacaacagactgtctttacgatccatccttctcacgttcagccggcgtataccaacccaccccacatggcccacgtacctcaggctcatgtacagtcaggaatggttccttctcatccaactgcccatgcgccaatgatgctaatgacgacacagccacccggcggtccccaggccgccctcgctcaaagtgcactacagcccattccagtctcgacaacagcgcatttcccctatatgacgcacccttcagtacaagcccaccaccaacagcagttgtaaggctgccctggaggaaccgaaaggccaaattccctcctcccttctactgcttctaccaactggaagcacagaaaactagaatttcatttattttgtttttaaaatatatatgttgatttcttgtaacatccaataggaatgctaacagttcacttgcagtggaagatacttggaccgagtagaggcatttaggaacttgggggctattccataattccatatgctgtttcagagtcccgcaggtaccccagctctgcttgccgaaactggaagttatttattttttaataacccttgaaagtcatgaacacatcagctagcaaaagaagtaacaagagtgattcttgctgctattactgctaaaaaaaaaaaaaaaaaaaaatcaagacttggaacgcccttttactaaacttgacaaagtttcagtaaattcttaccgtcaaactgacggattattatttataaatcaagtttgatgaggtgatcactgtctacagtggttcaacttttaagttaagggaaaaacttttactttgtagataatataaaataaaaacttaaaaaaaatttaaaaaataaaaaaagttttaaaaactga

SEQ ID NO: 425 - DNA, 4484 bp, Homo sapiens
gtagatgaggaaactgaagttgaggaatagtgaagagtttgtccaatgtcatagccccgtaatcaacgggacaaaaattttcttgctgatgggtcaagatggcatcgtgaagtggttgttcaccgtaaactgtaatacaatcctgtttatggatttgtttgcatatttttccctccatagggaaacctttcttccatggctcaggacacactcctggatcgagccaacaggagaactttctggtaagcatttggctaacttttttttttttgagatggagtcttgctgtgtcgcctaggctggagtgcagtggcgtgatcttggctcactgcagcctccacttcccgggttcaatcaattctcctacctcaacttcctgagtagctgggattacaggcgcccgccaccacacccggctcatttttgtacttttagtagagacacagttttgccatgttggccaggctggtcttgaattcctcagctcaggtgatctgcctgccttggcctctcaaagtgctgggattacaggcgtgagccactgtgcccggccttggctaacttttcaaaattaaagattttgacttgttacagtcatgtgacatttttttctttctgtttgctgagtttttgataatttatatctctcaaagtggagactttaaaaaagactcatccgtgtgccgtgttcactgcctggtatcttagtgtggaccgaagcctaaggaccctgaaaacagctgcagatgaagatggcaagcacccgctgcaagctggccaggtacctggaggacctggaggatgtggacttgaagaaatttaagatgcacttagaggactatcctccccagaagggctgcatccccctcccgaggggtcagacagagaaggcagaccatgtggatctagccacgctaatgatcgacttcaatggggaggagaaggcgtgggccatggccgtgtggatcttcgctgcgatcaacaggagagacctttatgagaaagcaaaaagagatgagccgaagtggggttcagataatgcacgtgtttcgaatcccactgtgatatgccaggaagacagcattgaagaggagtggatgggtttactggagtacctttcgagaatctctatttgtaaaatgaagaaagattaccgtaagaagtacagaaagtacgtgagaagcagattccagtgcattgaagacaggaatgcccgtctgggtgagagtgtgagcctcaacaaacgctacacacgactgcgtctcatcaaggagcaccggagccagcaggagagggagcaggagcttctggccatcggcaagaccaagacgtgtgagagccccgtgagtcccattaagatggagttgctgtttgaccccgatgatgagcattctgagcctgtgcacaccgtggtgttccagggggcggcagggattgggaaaacaatcctggccaggaagatgatgttggactgggcgtcggggacactctaccaagacaggtttgactatctgttctatatccactgtcgagaggtgagccttgtgacacagaggagcctgggggacctgatcatgagctgctgccccgacccaaacccacccatccacaagatcgtgagaaaaccctccagaatcctcttcctcatggacggcttcgatgagctgcaaggtgcctttgacgagcacataggaccgctctgcactgactggcagaaggccgagcggggagacattctcctgagcagcctcatcagaaagaagctgcttcccgaggcctctctgctcatcaccacgagacctgtggccctggagaaactgcagcacttgctggaccatcctcggcatgtggagatcctgggtttctccgaggccaaaaggaaagagtacttcttcaagtacttctctgatgaggcccaagccagggcagccttcagtctgattcaggagaacgaggtcctcttcaccatgtgcttcatccccctggtctgctggatcgtgtgcactggactgaaacagcagatggagagtggcaagagccttgcccagacatccaagaccaccaccgcggtgtacgtcttcttcctttccagtttgctgcagccccggggagggagccaggagcacggcctctgcgcccacctctgggggctctgctctttggctgcagatggaatctggaaccagaaaatcctgtttgaggagtccgacctcaggaatcatggactgcagaaggcggatgtgtctgctttcctgaggatgaacctgttccaaaaggaagtggactgcgagaagttctacagcttcatccacatgactttccaggagttctttgccgccatgtactacctgctggaagaggaaaaggaaggaaggacgaacgttccagggagtcgtttgaagcttcccagccgagacgtgacagtccttctggaaaactatggcaaattcgaaaaggggtatttgatttttgttgtacgtttcctctttggcctggtaaaccaggagaggacctcctacttggagaagaaattaagttgcaagatctctcagcaaatcaggctggagctgctgaaatggattgaagtgaaagccaaagctaaaaagctgcagatccagcccagccagctggaattgttctactgtttgtacgagatgcaggaggaggacttcgtgcaaagggccatggactatttccccaagattgagatcaatctctccaccagaatggaccacatggtttcttccttttgcattgagaactgtcatcgggtggagtcactgtccctggggtttctccataacatgcccaaggaggaagaggaggaggaaaaggaaggccgacaccttgatatggtgcagtgtgtcctcccaagctcctctcatgctgcctgttctcatggattggtgaacagccacctcacttccagtttttgccggggcctcttttcagttctgagcaccagccagagtctaactgaattggacctcagtgacaattctctgggggacccagggatgagagtgttgtgtgaaacgctccagcatcctggctgtaacattcggagattgtggttggggcgctgtggcctctcgcatgagtgctgcttcgacatctccttggtcctcagcagcaaccagaagctggtggagctggacctgagtgacaacgccctcggtgacttcggaatcagacttctgtgtgtgggactgaagcacctgttgtgcaatctgaagaagctctggttggtcagctgctgcctcacatcagcatgttgtcaggatcttgcatcagtattgagcaccagccattccctgaccagactctatgtgggggagaatgccttgggagactcaggagtcgcaattttatgtgaaaaagccaagaatccacagtgtaacctgcagaaactggggttggtgaattctggccttacgtcagtctgttgttcagctttgtcctcggtactcagcactaatcagaatctcacgcacctttacctgcgaggcaacactctcggagacaaggggatcaaactactctgtgagggactcttgcaccccgactgcaagcttcaggtgttggaattagacaactgcaacctcacgtcacactgctgctgggatctttccacacttctgacctccagccagagcctgcgaaagctgagcctgggcaacaatgacctgggcgacctgggggtcatgatgttctgtgaagtgctgaaacagcagagctgcctcctgcagaacctggggttgtctgaaatgtatttcaattatgagacaaaaagtgcgttagaaacacttcaagaagaaaagcctgagctgaccgtcgtctttgagccttcttggtaggagtggaaacggggctgccagacgccagtgttctccggtccctccagctgggggccctcaggtggagagagctgcgatccatccaggccaagaccacagctctgtgatccttccggtggagtgtcggagaagagagcttgccgacgatgccttcctgtgcagagcttgggcatctcctttacgccagggtgaggaagacaccaggacaatgacagcatcgggtgttgttgtcatcacagcgcctcagttagaggatgttcctcttggtgacctcatgtaattagctcattcaataaagcactttctttatttttctcttctctgtctaactttctttttcctatcttttttcttctttgttctgtttacttttgctcatatcatcattcccgctatctttctattaactgaccataacacagaactagttgactatatattatgttgaaattttatggcagctatttatttatttaaattttttgtaacagttttgttttctaataagaaaaatccatgctttttgtagctggttgaaaattcaggaatatgtaaaactttttggtatttaattaaattgattccttttcttaattttaaaaaaaaaaaaaaaaaaaaaaaaaaaaa

SEQ ID NO: 426 - DNA, 5763 bp, Homo sapiens
gcgcaaggcacctgctggcaatggcaggaggcggacgtggggggtcgtgcagtaggtactggagggagagacgtgggcacaaaggtcgcgggaggaacaggtgcccacaatggctgcatatttgcccgtggatcactgaagattcctgctctcctgctgaggtggagactgcagtgagctgagatcgcaccattgcactccagcctgggcaacgagtgcaaaactcagtctccagataaaaaaaagaaaaagaaaaaaaagaggccgggtgtggtggcttatgcctatgatcctagcactttgggaggtcggggtggacggatcacgagatcaggagttggaggccagcctggccaacatagtgaaagcccgtctctagtaaaaatacaaaatttagtcagacatggtgggcaggagagagcatgtgcaggggaacatccatttataaaaccatcagacctcatgagacttattcactaccatgagaacagcatgggggaaactgcctccatgattcagttatctccacctggccccacccttgacacatgggaattgttacaattcaagatgagatttgggtgcggacagagccaaaccatataattcttccccggcccctcccaaatctcatgtcctcatatttcaaaagcaatcatgccttcccctaagtcccccaaactcttatttcagcattaactcaaaattccatagtccaaagtctcatctgagacaaggcaagtcccttccacctatgagcctgtaaaatcaaaagcaagttagttattttctagatacacagggatacaggcattgggtaaatacactcgtttcaaatgggagaaattggccaaagcgaaagagctacaggccccatgcaagtccaaaacccagcaggcaaatcttaaagctccaaaatgacctcctttgactccatgtgtcacatctaggtgatgcaagaagtgggttcccagggtcttgggcagccccgcccctgtggctttgcagggtacagccccccttctggctgcattgagtgtctgcagcttttccaggcacacagtgcaagctgtcagtggatctaccattctggggtctggaggatggtggcccttttctcacagctctgcttggcagtaccccagtggggactctgtgtgggagctccaaccccatatttccctttgacactgtcctagcagaggttatccatgagggcccccccctcccctcccccccacagcaaacttttgcctggatttccaggcattttcatacatcttctgaaatgtaggcggaggttcatgaacgttaattcttgactttggtgcatctgcaggcttaacaccacctagaacctgaaaggcttggaacttgcaccctctgaagccatggcctgaggtgtaccttggccccttttacctatggcaggagcagctgggatgcagggccccaagttcctaggctgcacacagcagggggttctggacccacaaaaccatttttccttctaagcctcctggcctgtgatgggagggtctgctgtgagggtctctaacatgccctggagacatttgccccattgtcttggtgattaacatttggctcctcattacttatgcaaatttctacaacccagtctcctgagaaaatagatttttcttttctgttgcatcatcaggctacaaattttctgaacttttatgctctgcttcttctcgaatgctttgctgcttagaaatttcttctgtcagataccttcaatcatctctctcaagttcaaagttccacagatctgtagggaactctagaaagaaattcttattttccctctttcccgcctatcttatgcccgtttctaatacaggtgcacaatgcctgcagtgtctttgcatagtaagagtgactttactccatttcccaacaaattcctcatctccctctgagaccacctccgcctggaccttgttgtccatatcactattaacattttggtcaaagccattcaacaagtctctaggaagttccaaactttcccacattttcctatcctcttctgagccttccaaactgttccagcctctccctgttacccatttccaaagttgcttccacattttcgggtatctttacagcagcaccccactctactggtatcaacttattgtattagtctgttctcacaccgcaaataaagacatacctgagactgggtaatttataaaggaaagaggttgaattgactcacagttctgcatggctggggaggcctcacaatcatggtggaaggcaaggaggtgcaaaagcatgtctcacatagtggcaggcaggagagagcatgtgcaggggagctcccatttataaaaccatcagatctcatgagacttagtcactaccgcgagaacagtatggggggaaccatccccatgattcagttatctgcacccggccccacccttgacacgtgggaattattacaatgcaagggctggtgaattaccagatctccgtcaagtgcagtaaccagttcaagttggaagtgtgtcttttgaatgcagaaaacaaagtcgtggacaaccaggctgggacccagggccagctgaaggtgctgggtgccaacctctggtggccgtacctgatgcacgaacaccccgcctacctgtactcgtgggaggatggtgattgctcacaccaaagccttggacccctcccagcctgtgacctttgtgaccaactccacctacgcagcagacaagggggctctgtatgtggatgtgatccgtgtgaacagctactactcttggtatcgcaactacgggcacctggagttgattcagctgcagctggccgcccagtttgagaattggtgtaagacatcacaatcccattattcagagcgcgtatggagtggaaacgcttgtagggtttcaccaggatccacctctgatgttcagtgaagaggaccggaaaagtctgctagagcagtaccatctgggtctggatcaaaaacgcagaaaatacgtggttggagagctcatctggaattttgccgatttcatgactaaccagtccaaggatgaaggaaaaactggacctcattatggatttacttttgggatacactcattattccagaggagggtaaaaggctgagaagcttaagacttgctataattctgtgagagagctataaaagtctgctcagaaacattataacgtaaaatggacagagaaggacaatgagatatttaatttgccacggcaaagccattgctgtgaagaatggataatatatgtcaatggtaatatatgaagaaataacacagatggagctggcttgaaatcctcttgtttatggcagtacatatcgtttatgattcaaaaaatatagcccatttccaaaaacctgcaacaaagagatactttctcaggtgtcagtttcttggtcgggaatgaaaatagtgccaacctgtgataccttcactctaattttactttctgaggaagttttctgtaatagttatttggtgataattattaatactggtgagaaaatcaatgtaaaagaggagaaataacccacacaaccacatacaactaggaaatgatagatggatctgaaaaaaaaggatatgcactcttaacaagttcaacacccaagtactattgcaagtaccagctgtatttcatggaaaaaaaaaaaagaataactcaaaaggcagaacgaagagcctagaggtcagagatgagaggcatgaataattattcacaggcgttgaatataatcaaatgacttgcaacatttaccactgggattttaaaatgtggtggaccaatcattcttttagtctgtgcattttcccatttttttcaacaggaatgtctagagacattattcctgttttgccactgtatttttggtgaatgtgtagtaagtaactggcctctttagtatcacaaagctggatgaagaaaatgtggtacatatacaccatgaaatactatgccgccacaaaaaggaaatgagatcatgtcctctgcagggacatggatgaagctggaagccattatccttagcaaagtaacgcaggaacagaaaaccaaacaccacatgttgtctcttagaagtgggagctgaacgatgggctttgcagagattaaagcttcagaaaaaaatatgggaaaatatgttaaaatgttgacctgaaaatgaagtggatgactataaaactcttgagagaattagactttttgtagcagtttattacatgataataccttaaaggagatcacattcagtgacctgcgttgacagatgtgaatttcttcggagtaagaaatcctcagaggaaattacccagtatattcaaagctacaagggatttgttgacataacggtaatgtataacagcaatttttttctcaagtttttggattacctgtaagtgtctgactcagaagggcataggcattctttttatgtcatgggtttgatttctttcttcctttctcctttcattcccctggctcccatcttcaaagtgaaaaatatcacattcacttgctgacctagagcctttttctttttccagggctggcttctgacgggctctgcttgccttcctgatagtcttcccctttatgaatgaagccacttgccccagcttccctctgctgcccctatctgcaggcttgctaagatctcctgacctaggcgctgtcacccacagtgggctgcagagctggctcttcctagctggctaactatcctgaatcagtaaaaatttcctagtggagagtgatgggaaatcgaatccaaactggcttaaacaaaaatgagaatttattgattaacatgactcaggagaccagaactctatagagaacatggcctgacagtgggggaagagaggtgtttcctcaaaaagaaactgggtgcagctttcccagaagaatcagttgctcaatatataataccctgatgaatttagttaccattctatgtctcttacttcctcattcgtcaaagtacatctgtgatatttaaatgcaggtctgttttcaaggtcagtttccggaaacagtgaccctgagaaggcttcctcctgagtatgcataaacattcacagcttgcatgcgtgtgtgtgtgtgtgtgtgtgtgtgtgtgtatgtttgcttgcactgcataaaaacaattgcaacatcaacagaaataaaaattaaaggaataattctcctccgactctgccgttccatccagtgaaactcttcattctggggtaaagttccttcagttcttgttcatagataggtatatacttcataagtcaaacaatcaggctgggcgcagtagctcatgcctgtaatcccagccctttgggaggccgagctgggcagatcacttgagatcaggtgttcgagaccagcctcaagacctccaacatgggccgggtgcagtggctcacgtctgtaatcccagcactttgggaggccgagacggacggatgatgaggtcaggagatagagaccatcctggctaacatggtgaaaccccatctctactaaaaatacaaaaaaaaaaaaaaattagcccggcatggtggcaggcgcctgtggtcccagctactcgggaggctgaggcaggagaatggcgtgaacctgggaggcagagcttgtagtgagccaagtgccactgtgctccagcctggacgacagagcgagactctgtctcaaaaaaaaaaaaaaagaaaaaaaaaaaaaaaa

SEQ ID NO: 427 - DNA, 2393 bp, Homo sapiens
gagagagcgagacctgggagggaggggtcctccagcagaaaggggcgggggaaaaggtgcaaaagcagcgtgggagcgccgggctggcttcctgcggctgctgctggtctgactgggaagcagcaagccaccactacgaactctcaagaggagtgggagtgcgggagtccagagctgcctctgggaagtctgcagtagttgagcaaaggggtcctcacgttcctgagagctgggcaggggggattttggaacctggggcagccaagaacgagcagccaagggtacgggagattagttgtgcacagagcagtgctagtcgggcttgggggtggctggtgggcactgcgtgggaaaccttggtttgtagttttcttggtttgcgttactcctgttgggtagaattaccctccgcgcctttgtacaagacacggtgtctcctggggcaaggaaggagccaggatggcctgggctctgaagctgcctctggccgacgaagtgattgaatccgggttggtgcaggactttgatgctagcctgtccgggatcggccaggaactgggtgctggtgcctatagcatgagtgatgtccttgcattgcccatttttaagcaagaagagtcgagtttgcctcctgataatgagaataaaatcctgccttttcaatatgtgctttgtgctgctacctctccagcagtgaaactccatgatgaaaccctaacgtatctcaatcaaggacagtcttatgaaattcgaatgctagacaataggaaacttggagaacttccagaaattaatggcaaattggtgaagagtatattccgtgtggtgttccatgacagaaggcttcagtacactgagcatcagcagctagagggctggaggtggaaccgacctggagacagaattcttgacatagatatcccgatgtctgtgggtataatcgatcctagggctaatccaactcaactaaatacagtggagttcctgtgggaccctgcaaagaggacatctgtgtttattcaggtgcactgtattagcacagagttcactatgaggaaacatggtggagaaaagggggtgccattccgagtacaaatagataccttcaaggagaatgaaaacggggaatatactgagcacttacactcggccagctgccagatcaaagttttcaagcccaaaggtgcagacagaaagcaaaaaacggatagggaaaaaatggagaaacgaacacctcatgaaaaggagaaatatcagccttcctatgagacaaccatactcacagagtgttctccatggcccgagatcacgtatgtcaataactccccatcacctggcttcaacagttcccatagcagtttttctcttggggaaggaaatggttcaccaaaccaccagccagagccaccccctccagtcacagataacctcttaccaacaaccacacctcaggaagctcagcagtggttgcatcgaaatcgtttttctacattcacaaggcttttcacaaacttctcaggggcagatttattgaaattaactagagatgatgtgatccaaatctgtggccctgcagatggaatcagactttttaatgcattaaaaggccggatggtgcgtccaaggttaaccatttatgtttgtcaggaatcactgcagttgagggagcagcaacaacagcagcagcaacagcagcagaagcatgaggatggagactcaaatggtactttcttcgtttaccatgctatctatctagaagaactaacagctgttgaattgacagaaaaaattgctcagcttttcagcatttccccttgccagatcagccagatttacaagcaggggccaacaggaattcatgtgctcatcagtgatgagatgatacagaactttcaggaagaagcatgttttattctggacacaatgaaagcagaaaccaatgatagctatcatatcatactgaagtaggagtgcggcgtttcgtgcccagtggctgctccttccttcacctctgaaaacggccctcttgaagggggatatgaatggagatttgaaggtctgcaagaacctgactcgtctgactgtgtgtggaggagtccaggccatggaggcagaatcctggccctctgtgttggcccaagctcttgtggtacacacagattactgcccaatatgcagttctgcagctgttttagttaaatttctggaccttgttgttgttaaatatcagtagaaactctacataatttagagtgtatgtagggcataatgatgatgggaattgtgtgatgtttaacaggaagatcttaaattttgtgatatggagccctgtaatttttttcttatataaaaatgggtatctatattcataaaaaaaaaaaaaaaaaaaaaaa

SEQ ID NO: 428 - DNA, 4157 bp, Homo sapiens; identical to SEQ ID NO: 80

SEQ ID NO: 429 - DNA, 3648 bp, Homo sapiens
gccgctccccggcgggctggctcctggccccggaagcgcgagcgttcacttagcggcgagtggctccgtctccgcggacagagcgcgcgccccctggcccggcccgcgaggggctcccggcgcggtccccgagcatttcccgccgggtggagcgggccgagcccggcaggatgaccagccccgcggccgctcaaagccgggagatcgactgtttgagcccggaagcgcagaagctggcggaagcccggctcgctgcaaaacgggcggcccgcgcggaggctcgcgagatccgcatgaaggagctggagcggcagcagaaggaggaagacagtgagcgctactctcgtagatccagaagaaacacatcggcttctgatgaagacgagcgcatgtcagtgggtagtcgtggaagcctgagggtagaagagagaccagaaaaagattttactgagaaggggtctcgtaacatgccgggcctgtctgcagccacgctggcctctctgggtgggacttcctctcggagaggcagcggagacacctccttctccatcgacaccgaggcatccatcagggaaatcaaggactctctagcagaagttgaagagaaatataagaaggctatggtttccaatgctcagctagacaatgaaaagacaaacttcatgtaccaggttgataccctaaaagatatgttgctggagcttgaagaacagctggctgaatctaggcggcagtacgaagagaaaaacaaagaatttgaaagggaaaaacacgcccacagtatactgcaatttcagtttgctgaagtcaaggaggccctgaagcaaagagaggaaatgctcgagaaacatggaataatcctaaattcagaaatagctaccaatggagagacttccgacaccctcaataatgttggataccaaggtcctaccaagatgacaaaagaagagttaaatgccctcaagtctacaggggatgggaccctaggaagagccagtgaagtggaggtgaaaaatgaaatcgtggcgaatgtggggaaaagagaaatcttgcacaatactgagaaagaacaacacacagaggacacagtgaaggactgtgtggacatagaggtattccctgctggtgagaataccgaggaccagaaatcctctgaagacactgccccattcctaggaaccttagcaggtgctacctatgaagaacaggttcaaagccaaattcttgagagcagttctctccctgaaaacacagtacaggttgagtcaaatgaggtcatgggtgcaccagatgacaggaccagaactccccttgagccatccaactgttggagtgacttagatggtgggaaccacacagagaatgtgggagaggcagcagtgactcaggttgaagagcaggcaggcacagtggcctcgtgtcctttagggcatagtgatgacacagtttatcatgatgacaaatgtatggtagaggtcccccaagagttagagacaagcacagggcatagtttagagaaagaattcaccaaccaggaagcagctgagcccaaggaggttccagcgcacagtacagaagtaggtagggatcacaacgaagaagagggtgaagaaacaggattaagggacgagaaaccaatcaagacagaagttcctggttctccagcaggaactgagggcaactgtcaggaagcgacaggtccaagtacagtagacactcaaaatgaacccttagatatgaaagagcccgatgaagaaaagagtgaccaacagggagaggcattggactcatcgcagaagaagacaaagaacaagaaaaagaaaaacaagaagaaaaaatccccagtacccgtagaaacccttaaagatgttaaaaaagagttaacgtatcagaacacagatttaagtgaaattaaggaagaagagcaggtaaagtctactgacagaaagtcagcagtggaagcccaaaacgaggtgactgaaaatccaaaacagaaaattgcagcagaaagcagtgaaaatgttgattgtccggagaatcctaaaattaagttggatggaaaacttgaccaagaaggtgatgatgtacaaacagcagctgaggaggtactagctgatggagacacattagattttgaggatgacaccgttcaatcatcaggcccgagggctggtggtgaagaattagatgaaggtgttgcaaaagataatgctaaaatagatggtgccactcaaagcagtcctgcagaaccaaagagcgaagacgcagatcgctgcaccctgcccgaacatgaaagtccctcacaggacattagtgatgcctgtgaagcagaaagtacagagaggtgtgagatgtcagaacatccaagtcagaccgtcaggaaagctttagacagcaatagcctagagaacgatgacttgtcggcaccaggaagagagccagggcacttcaatccagaaagcagagaagataccagaggagggaatgagaagggcaaaagcaaagaagactgtaccatgtcctaagctgaggcaggcggcaggcgcggtgcacaggaagtctcagtgtgaaggggtcttttctctccactgccaatgtaagtagaatgttctaaattcatagagaggcactgtatgacaattaccaggtgctctactgctttaagttatagactgttacttgtagatttccatgtaatcattgaggttatcacccagattagaaagacatatttgttatcagtgtacgttctaattgagagcattccagtagtatcaaacaataatgtctactgtttatagtccacttaataaaaatagaggcatttactatttgccttaggctgataggaatgtgggttttcttgaccaaatatatcagcatctaattgaaatgaccaaatagcattcttagacttctgtattatgaatataattgatatttaaattaatgtcttgttcacatatgtgtactttcatatttgattttaaaatgtacattataacctgtatggtattttatttaaaggagataaacagccaaatagcaaataggtcactgaatgataagatttgcaccttagaacaataatcattttaaggataacaagtaaatgtctgaaagcatgaggggctttatttgcctttacctcatatgagtctttgatcttgaaccgatacttttggatctcattgttgatatacctgaatttactttgtaagagattttaacttcacttcatgctgatgatgtatcaaattcattttatagaaagatttaaagtttttttctggaagtgatatatgtcaaattacatttcctactgcagtatttgagcagggacagtcattttttaaatgtttttggccgggcgtggtggctcatgcctgtaatctcagtacattgggaggccaaggcaggtggatcacctgaggtcaagagttcgaggccagcctggccaacatggtgaaaccctgtctctactaaaaatacaaaaaattggccgggcgtgatggtgggcgcctgtaatcccagccactccagaggctgaggcaggagaatcgcttgaacctgcgaggcagagattgcagtgagccaagatcaagccattgtactccagcctggacaacaagagcgaaactctgtcta

SEQ ID NO: 430 - DNA, 6501 bp, Homo sapiens
gcggggcggaacgcgccgggcgggctccaccgcgccgtgtgcttccgcaggttgcgggggtcgctggggccttgtggcggggcagctccgcggggcttcgcccgctctctcacctcgccgtgctctctcgcggcggccggcggggcccgcgctgcagccggagacccggagaaaggtgaagaactgaatgtcatcatgtctggaatcaagcgaaccatcaaagaaaccgaccctgattacgaggatgtatctgtggcccttccaaataagcggcataaagcaattgagaattcagctcgagatgctgctgtgcagaagattgagactattatcaaagaacagtttgctcttgaaatgaagaataaggaacatgaaattgaagtcattgaccagcgactgattgaagcaagaaggatgatggataaactgcgtgcctgcattgtagcaaactactatgcttctgcaggtcttctaaaagtttctgagggatcaaagacatgtgatacaatggtttttaatcatcctgctatcaagaaatttttggaatcaccatctaggtcatcatctcctgccaatcagagagcagaaacaccatcagccaatcattcagaaagtgattctttatctcagcacaatgacttcttatctgacaaagataataacagcaatatggatatagaggaaagactctcaaacaacatggagcagagaccaagccgaaatactggaagggatacttctagaattactggctcccataaaacagaacagcggaatgctgatctcacagatgagacttcacgactttttgtaaagaaaacaatagtagtgggcaatgtgtccaagtatatacctccggataagagggaagaaaatgaccagtcaactcataagtggatggtatatgtccgagggtcccgtagagaacccagcattaatcattttgtcaagaaggtttggttcttccttcatcctagctataaaccaaatgaccttgtggaagttagagagcctccttttcacctgaccagaagaggctggggtgagtttcccgtcagagttcaagttcattttaaggacagccagaacaagcggatagatatcatacataatctgaagctggatagaacttatactggcttgcagactcttggagcagagacggtagtggatgttgaactccatcgccattctctcggagaagactgtatctatcctcagtcctcggagtctgacatctctgatgcccctccatctttgcctttgaccattccagccccagtgaaagcttcttcaccaataaagcagtcacatgagccagtacccgatacctctgtggagaaaggattcccagctagcactgaagctgaacgacacactccgttttatgctttgccatcttcattggaaagaacacccaccaaaatgactacatcccagaaagttaccttttgttcccatggcaattcagctttccagccaatagcatcaagctgcaaaattgttccacaaagtcaggttcctaatcctgagtcacctggaaaatccttccagcccatcaccatgagctgcaagattgtgtcaggttccccaatatcaactccaagcccatcaccattgcctcgaaccccgacttccactccagtccacgtgaagcaaggcactgccggctctgttattaataatccttatgttatcatggacaagcagccggggcaggtgattggagccaccactcccagtacaggaagtcctacaaacaagatctccacggcttctcaggtctcccaaggaacaggttcccctgttcctaaaattcatggaagtagttttgtaacatctactgtcaagcaggaggattctttgtttgcatctatgccacctctttgcccaattgggagtcaccctaaggttcaaagccccaaacctataacaggaggacttggagctttcacaaaagtgatcatcaaacaggaacctggtgaagcccctcacgtgcccgcaacaggagctgccagccagtcaccactcccgcagtatgtgactgtgaaagggggtcacatgatagctgtgtcccctcaaaaacaggtcataactcctggagaagggattgcccagtcagcaaaggttcagccctccaaggttgtcggggtaccagttgggtctgctttaccttcaacagtgaagcaggctgtggcgatcagtggtggccagatcctggtagccaaggccagctcttctgtctccaaagcagttgggccaaagcaagttgtaacccaaggagttgccaaagcaattgtgagtggaggtggaggaaccattgttgctcagccagtgcagaccttaaccaaggcccaggttactgccgctggtcctcagaagagtggatcccagggttcagtaatggcaacgttgcagctaccagccactaatttggccaacttggcaaatttgcctcctggcactaaactctacctaactacaaacagcaagaacccttcaggaaaaggaaaactgctgctgatccctcaaggagccatcctgcgagctacgaacaatgctaatctccagtctggctcagctgccagtggtgggagtggtgccggaggaggaggaggaggaggaggaggaggcggcagtggcagcggtggaggcggcagcacaggaggaggaggaggaacagcaggaggaggaactcaaagtactgctggccctggagggatatctcagcacctgacttacacatcttacatcctcaagcaaactccccagggcacatttttagttggccagccatcaccccagacttctggaaaacaactcaccactgggtcagtggtccaaggaacactgggagtcagcacatcttctgcacaaggacaacaaacgctaaaagtcatctctggacagaaaaccacattgtttacacaggcagcccatggaggacaggcatctctaatgaaaatatccgatagcaccttgaagactgtgccagccacctcacagctctcgaagcctggaaccacaatgctgagagtagcaggaggggttatcacaactgccacttcccctgccgtggccctctcagcaaacggtcctgcacaacagtctgaaggaatggctcccgtgtcttcatctacggtcagttctgtaacgaaaacttctgggcagcagcaagtgtgtgtgagccaggccaccgtgggaacctgcaaggctgccacccccaccgtcgtcagcgccacgtccctcgtgcctacaccaaaccccatctctgggaaagccacagtatccggactgttaaagattcactccagtcagtccagtccgcagcaggccgtcctgacgattcccagccagctcaaaccactcagcgtaaacacatctggaggggtgcagacgatcctgatgcctgtgaataaagtggttcagtcattttctaccagcaagccacctgccattctgcctgtagctgccccaactccagttgtccccagctctgctccagcagctgttgcaaaagtgaagactgaaccagaaacacctggaccgagttgcctctctcaggagggtcagacagcagtgaaaacagaagaaagttctgagctgggaaactatgtcattaagatagaccatttagaaactatccagcaactcctaactgcagtagtaaagaagattccattaatcactgcaaaaagtgaagatgccagctgcttttctgcaaagtctgtggagcagtactatggctggaacattggaaaaaggagagccgctgagtggcaaagagcaatgacaatgcgaaaagtcttacaagaaatcctggagaagaatccgagatttcaccacctgactcccctcaaaaccaagcacatcgctcactggtgccgctgtcatggctacaccccaccggaccctgagagcctgaggaatgacggggactctatcgaggacgtgctgacccagatcgacagcgagcccgagtgcccatcatcattctcctctgctgacaacctctgccgcaaactggaggacctgcaacagttccagaaaagggaacccgagaatgaggaggaggtggacatcctcagcctctccgagccagtgaagataaacatcaagaaggagcaggaagagaaacaagaggaagtcaagttctacctgccaccaaccccagggtctgaatttattggggatgtcacacagaagattgggatcaccctgcagcccgtggcactccacaggaacgtgtatgcgtccgtggtggaggacatgatcctgaaggctacagaacagctggtgaatgatatcctgagacaggctttggcagttggataccagacagcttctcacaacaggattcccaaagaaattacagtgagtaatattcaccaggccatttgcaacattccttttctggacttcctcacaaacaaacacatgggaatattgaatgaggaccagtgagcggagtgaggtgccctggagaagcaggctttgaaggcacagcgaagctgtaactgaggaccctgctgctcgggaaggaggtggtttccagtgtgactcggcatgtcatggctacccaacctttgccgctgcctgttcccacgtgtcaccagcacgctgcactccagatgaaatcctcctaggacaggagtttgtttcctgagtgtggagtgaggctgtcagtggatccgtgctttgtcggccagcgtttctgcagtctttgtaaaggccccacgagagcgggccaggccgtgtgcctcaggcccttctccctgggtgtgcttaagggggctccttgggcccgcctccccaggaggtagaaaatgagtggcaggctagagatttcacccattttgtgggctggagttaccagtagctccagcagttaccctgaagagagattgggcttcagccttcagcaggtggttctctcccatgcctggccttggtgtggaggggctgtactctgagcccaagtgagtcagctataggaagaggccatacctagagccaagaaccatgaaggcctgagagacggcagactgagcagaattccttttttgagcacgagagcattactagaaccattgtcaaagcagtggcaagggacggagaggtcccaacaggagtcaggaagaggtttgattataaccaagaaaactcactatgctaggaatagactgtgtgcaccagtcccagacacttggcagaagtgtagcagcgttacacatgtgtgcgaagcagatcgcaggttccacgccatctgcatggcctgcaggagcttctgctgctgaccccatgctgagtggccagtggggagcggcgcccggcaggctcttctggggtcgtctgtcctatccgtggattgtatatactcttctctgttaaggagtttttcccaagaagaaaagtatttaaaagaaataccagtgagtgccttaaagttggagaagtaactgcccatgcccagaaataaggatgccagtgcccagaagcagtgagattagtctgtgtccacaagcagaggccccctcgatgggagggagtggcaggcaggagaaggtggcgctgccaggtgcccgggtctattggaggcgccccatctcagacttcctaacacagcctgtgtggaaggcagaacaaagaatgcatgcccagtcagaaatctgttctattctgctccaggaaaatcggaaacctgtgagtcagagtcagagaaacttacccaagcaacgtaattcctgttttcatgggtcctgtagatgtttgagtcaggaaggtaaggcggggagtgactgaataaactctgccttttaaattgagcatctgggccgggcatggtggctcacgcctgtaatcccagcactctgggaggtcgaggtgggtgggtcacctgaggttgggagttcgagaccagcccgaccaacatggtgaaaccccgtctctactaaaaatacagaaaattagctgggcatggtggtgtgtgcctgtaattccagctactcgggaggctgaggcaggaagaatcacttgaacccaggaggcggaggttgcagtgtgccaagatcataccactgcactccagccctggtgacagaggagaccccgtctcaaaaattgattgatcaattcagcatctgagggctgcaagtacagaaggaatctattctcagcagggcatagggcacgcactggcttaacagtttagtatataaggctcaaatagtctatacctgaactgctataagcaaggtcgatagggaagtggatagattgcttcagcaaagtgaactgtgagatctccaggacagagggagaaagatctgatccaaatgagaacagattggttattgcaggtatcacagcctaaagaaattatctttttgcaaaagaaatattaaatgatttagcagtctccacgtgtgttaatgtttcaaacgtgtatcataatgtgtataattgtgtaacaaaattgtctacaataaatcttttggtatt

SEQ ID NO: 431 - DNA, 2676 bp, Homo sapiens
gggttctaagggtcggcggcggcggggttgacggctttgcctaggtccctccgcccgtagctgtcgggtcccggccccgctctgcccacagactccgatggctgcggccgcgctgagggccccgactcaggttactgtgtctccagaaacacatatggacctcacaaagggctgtgtgacctttgaggacatcgccatttacttctcacaggacgagtggggacttcttgatgaggctcagagactcctgtaccttgaagtgatgctggagaactttgcccttgtagcctcactgggttgtggccatggaacagaggatgaagagacaccttctgaccagaatgtttctgtaggagtgtcacagtcaaaggcaggttcatccacacagaagactcaatcctgtgagatgtgtgtcccagtcctgaaagatattttgcatctagctgatctccctgggcagaaaccatacttggttggagaatgtacaaaccatcaccagcaccagaagcatcacagtgcaaagaaatccttgaagagggacatggacagagcctcatatgtgaagtgctgcctattctgtatgtcattgaagccctttcgcaaatgggaggttggaaaggaccttccagccatgttgcggcttctgaggtccctggtctttcctggaggcaagaaacccggcacaattactgaatgtggggaggacattcgcagtcaaaaaagtcattacaagtcaggtgaatgtgggaaggcttccaggcacaaacacactcctgtttaccatccaagagtctacactggaaaaaagctttatgagtgtagcaaatgtgggaaagccttccgtggcaagtactcacttgttcagcaccagagagtccatactggagaaaggccttgggagtgcaatgaatgtggaaaattctttagccaaacctcccacctgaatgatcatcggagaatccacaccggagaaaggccttatgagtgcagcgaatgtggaaaattatttagacaaaactccagccttgttgaccaccagaaaatacacactggagcaaggccttatgagtgtagccagtgtgggaaatcctttagccaaaaagccacccttgttaaacaccaaagagttcacactggagaaaggccttataagtgtggtgaatgtgggaattcctttagtcaaagtgccattcttaatcaacaccgaagaattcacactggagcaaagccttatgagtgtggccagtgtgggaaatcctttagtcaaaaagctaccctcattaaacaccagagagttcacactggagaaaggccttataagtgtggtgactgtgggaaatcctttagtcaaagctccatccttattcaacaccggagaattcatactggagcaaggccttatgagtgtggccagtgtggaaagtcctttagccaaaagtctggtctcattcaacaccaagtggttcacactggagaaaggccttatgagtgcaacaaatgtgggaattcctttagccaatgctccagcctcatacatcaccaaaaatgtcataacacatagaggcctcatgaatgcagcaaatgtggaagcgccttcaactcaagatctatcatcatttagctcctgaaagtccacacttaagtagagccttagacctacagggaaagtgctgtctctgtagtattgtagcagtagagagcctttgtgagggagccatctgcctgaagttgaacctcattcttccttgtttctctggtagaaaccatctaccctctaccaccttgcacagtgggcactggtcactcctatgtgctaagacaaggcagacatctgtgtgttctcttaagtctttggaggaaatcttgagcagtctaagcctttagagaaaattcattcttttttctgactgatcacagcatacgtgtgacccagtttgggtcaggagggcccagccttggttctgctggacacttatgtgcaaggattcccttcatgtaaattcttggtctcacatgacacttggtcattcttccagcctccatgtcaccacgtggtgaatggctgcctcacattgctccagtttgtgcactaataaaagccttatatttgaatctacctgtagtcttggggttctgtttactgtgtggggtggctgggagacagacttcaactctatatgaaggaatggatggcttttgtgggcctctgcaggaaagtaagatgacagagtaattctaattctggttttggtcatacttgctttgctacctaaaatctcctaggaaaaaatgcaaggttttggttattctaatttgtggcctggatccctattctttctgtgagactagaggtcatcctgaggagaggccagctgttatgacaagcatgtgtgcttcagggaataggacaattttattccattgtttccagaggatgtcatatgatgcccagtgctgctgagaagcttttcatggggttctataaggaggcatgccctgatatcaaacattccataggccgatgtcacgcagaagacaacgcgagtcacatgtgaactgtaattggtacagaaatacctgggtatttctgtactgtgtgtactgtagcaaactagttggaatgtgcctcttataaaagtacatttacaaatcttcccgtgactgtggctttgagca

SEQ ID NO: 432 - DNA, 3243 bp, Homo sapiens
gttgctgatctttggatgttctggttagtctaagaaggagagtatgaggcgagctccggcccgggtgcggccgggcttcaggggcccaggcgccgctgctgccaccgccatctaacgctgcgccctggaggcccggcgcgcggatggtgccggtgcggctcgggtgttgaaacgggtgtcccctccccctcctcccctcccccacgcggtggtctcccctcccacccggctcaggcagagccatgtctcggggtggctcctacccacacctgttgtgggacgtgaggaaaaggtccctcgggctggaggacccgtcccggctgcggagtcgctacctgggaagaagagaatttatccaaagattaaaacttgaagcaacccttaatgtgcatgatggttgtgttaatacaatctgttggaatgacactggagaatatattttatctggctcagatgacaccaaattagtaattagtaatccttacagcagaaaggttttgacaacaattcgttcagggcaccgagcaaacatatttagtgcaaagttcttaccttgtacaaatgataaacagattgtatcctgctctggagatggagtaatattttataccaacgttgagcaagatgcagaaaccaacagacaatgccaatttacgtgtcattatggaactacttatgagattatgactgtacccaatgacccttacacttttctctcttgtggtgaagatggaactgttaggtggtttgatacacgcatcaaaactagctgcacaaaagaagattgtaaagatgatattttaattaactgtcgacgtgctgccacgtctgttgctatttgcccaccaataccatattaccttgctgttggttgttctgacagctcagtacgaatatatgatcggcgaatgctgggcacaagagctacagggaattatgcaggtcgagggactactggaatggttgcccgttttattccttcccatcttaataataagtcctgcagagtgacatctctgtgttacagtgaagatggtcaagagattctcgttagttactcttcagattacatatatctttttgacccgaaagatgatacagcacgagaacttaaaactccttctgcggaagagagaagagaagagttgcgacaaccaccagttaagcgtttgagacttcgtggtgattggtcagatactggacccagagcaaggccggagagtgaacgagaacgagatggagagcagagtcccaatgtgtcattgatgcagagaatgtctgatatgttatcaagatggtttgaagaagcaagtgaggttgcacaaagcaatagaggacgaggaagatctcgacccagaggtggaacaagtcaatcagatatttcaactcttcctacggtcccatcaagtcctgatttggaagtgagtgaaactgcaatggaagtagatactccagctgaacaatttcttcagccttctacatcctctacaatgtcagctcaggctcattcgacatcatctcccacagaaagccctcattctactcctttgctatcttctccagacagtgaacaaaggcagtctgttgaggcatctggacaccacacacatcatcagtctgataacaataatgaaaagctgagccccaaaccagggacaggtgaaccagttttaagtttgcactacagcacagaaggaacaactacaagcacaataaaactgaactttacagatgaatggagcagtatagcatcaagttctagaggaattgggagccattgcaaatctgagggtcaggaggaatctttcgtcccacagagctcagtgcaaccaccagaaggagacagtgaaacaaaagctcctgaagaatcatcagaggatgtgacaaaatatcaggaaggagtatctgcagaaaacccagttgagaaccatatcaatataacacaatcagataagttcacagccaagccattggattccaactcaggagaaagaaatgacctcaatcttgatcgctcttgtggggttccagaagaatctgcttcatctgaaaaagccaaggaaccagaaacttcagatcagactagcactgagagtgctaccaatgaaaataacaccaatcctgagcctcagttccaaacagaagccactgggccttcagctcatgaagaaacatccaccagggactctgctcttcaggacacagatgacagtgatgatgacccagtcctgatcccaggtgcaaggtatcgagcaggacctggtgatagacgctctgctgttgcccgtattcaggagttcttcagacggagaaaagaaaggaaagaaatggaagaattggatactttgaacattagaaggccgctagtaaaaatggtttataaaggccatcgcaactccaggacaatgataaaagaagccaatttctggggtgctaactttgtaatgagtggttctgactgtggccacattttcatctgggatcggcacactgctgagcatttgatgcttctggaagctgataatcatgtggtaaactgcctgcagccacatccgtttgacccaattttagcctcatctggcatagattatgacataaagatctggtcaccattagaagagtcaaggatttttaaccgaaaacttgctgatgaagttataactcgaaacgaactcatgctggaagaaactagaaacaccattacagttccagcctctttcatgttgaggatgttggcttcacttaatcatatccgagctgaccggttggagggtgacagatcagaaggctctggtcaagagaatgaaaatgaggatgaggaataataaactctttttggcaagcacttaaatgttctgaaatttgtataagacatttattatatttttttctttacagagctttagtgcaattttaaggttatggtttttggagtttttccctttttttgggataacctaacattggtttggaatgattgtgtgcatgaatttgggagattgtataaaacaaaactagcagaatgtttttaaaactttttgccgtgtatgaggagtgctagaaaatgcaaagtgcaatattttccctaaccttcaaatgtgggagcttggatcaatgttgaagaataattttcatcatagtgaaaatgttggttcaaataaatttctacacttgccatttgcatgtttgttgctttctaattaaagaaactggttgttttaagataccctgaaaaaaaaaaaa

SEQ ID NO: 433 - DNA, 4406 bp, Homo sapiens
gctccagcgactcggcggcacccgccgctttgaggtagcgggtcccgacaggcgatggacccctcgggctcccgggggcgccccacgtgggtgctggccgggggtctcctggcagtggccctggcgctggggggccgaggctgtctcggcgccagctcacgtccccgctggcgccccctcggcgcgcagccaccccgggatccccaggtggctcctaggtctgggcccggcctgaggatccctccggggcggagcggggcggggcccgagagcagcacgcaggacttgccctgtatgatttggcccaaagtggaatgctgtcactttaagactgcagtggaagcaccacttggaatgaaattggacaagaaaatggaagtcttcatcccactctcaacttctgcagcctctagtgggccatgggctcattccttatttgcttttataccctcctggcctaagaagaacttatttaaaagagagtctcctataacacaccgcctgtatggggacatttcaagagaagttcaagggacttctgaaaatggagtaatttttcagaaatgtgcactggtgtctgggtcgagtgaagcacagacagcccgcatatggctgcttgttaacaacaccaagacaacctcgtcagccaacctctcggagctgctcttgctggacagcattgctggtctcaccatttgggactctgtgggaaacaggacctcggaaggattccaggcttttagcaagaagtttctgcaagtgggagatgcctttgctgtcagctacgcagccacgctccaggctggagacctcgggaacggggagagcctcaagcttcctgcccaactcacctttcagagctcgtcacggaacagaacacagctgaaagtgcttttttccataacagcagaagaaaacgtaacggttctgccgcaccacggcctccacgcagcagggttcttcattgccttcctcctctcccttgtgctgacctgggctgccctcttcctcatggttcgctatcagtgtctgaagggaaacatgctcaccagacatcgggtttggcagtatgagagcaagctggaacccttgccgttcacctcagctgatggcgtgaatgaggacctttcccttaacgaccaaatgatagacattctgtcttccgaggaccctgggagcatgcttcaagccttagaagagttggagattgcaaccctgaatcgggcagatgcagatctggaggcttgtcgaacacaaatcagcaaggatatcattgcccttctgctgaaaaatctcaccagcagtggccacctctcaccccaagtagagagaaaaatgagtgctgttttcaaaaagcagtttctattgctggaaaatgaaatacaagaggagtacgatcggaagatggtggcattgacagctgaatgtgacctggaaacaagaaagaagatggaaaaccagtaccagagagagatgatggcaatggaggaagcagaagagttgctgaaacgtgctggtgagaggtctgctgtagagtgcagcaaccttctgcggaccctccatggcctggaacaggagcacttgaggaagtctctcgctttgcaacaagaagaagactttgccaaagctcacagacagctggctgttttccagagaaatgaactgcacagtatcttttttacccagataaaaagtgctattttcaaaggggaattgaaaccagaggcagctaaaatgctgctgcaaaattattctaaaatacaggagaatgtagaagagttaatggactttttccaggctagtaagaggtatcatctaagtaaaagatttggccacagggaatatctggtccagaacctccagtcatcagagacccgtgtgcagggccttctgagcaccgctgcagcccagctgactcacctcattcagaagcacgagagagcagggtacctggatgaagaccaaatggaaatgctattggagcgggctcagacagaagtcttttcaatcaagcagaagttggacaatgacttaaagcaggaaaagaaaaagctccaccaaaaattaataactaagagaagacgagagttgctacaaaagcacagggagcagcgtagggagcaggcgtccgtcggcgaggccttccgaacggttgaggatgccggccagtacctgcaccagaagaggagcctgatggaggagcacggtgccaccctggaggagctgcaggagcgtctggaccaggccgccctggacgatctcaggaccctgaccctttcgctgtttgaaaaggccaccgacgagctgcggcgcctgcagaactcagccatgacccaggagctgctcaagcgtggggtgccctggctcttcctgcagcagatcctggaggagcacggcaaggagatggctgcacgggccgagcagctggagggggaggagagggacagggaccaggagggtgtccagagcgtgaggcagagactgaaggatgacgctcctgaggccgtgacagaggagcaggcagagctgcgacgctgggagcacctgatcttcatgaagctctgctcctcagtcttctccctgtctgaagaggagctgctcaggatgaggcaggaggtccatggctgctttgctcagatggacaggagcttggccctccccaagatccgggcccgagttctgctgcagcaatttcagactgcgtggcgagaagcagagttcgtgaagctggaccaggccgtggctgcccctgagctgcagcaacagtccaaggtgagaaagtcacggtccaagagtaaaagcaagggagagcttctgaagaagtgcatcgaagacaaaattcacctctgtgaggaacaggcctctgaagacctggtggaaaaggttcgaggtgaattgctgcgggagagagtgcagcggatggaggcacaggagggaggctttgcacagtcgcttgttgctctgcagttccagaaggcgtcccgggtgaccgagactctgtcggcctacaccgccctcctcagcatccaggacttgctcctggaagagctgagtgcatctgagatgctgaccaagtcggcctgcacacagatcctggagtcgcacagccgggagctccaggagttggagaggaagctggaggaccagctggtgcagcaggaggcagcccagcagcagcaggccctggcgagctggcagcagtgggtggccgatgggcccgggattctgaacgaacctggggaggtggattctgaaaggcaggtctctactgtcctgcaccaagccctgagcaagagccagacattactggagcaacatcagcagtgtttgagagaggaacaacagaacagtgtcgtgctagaagacttgttggaaaacatggaggcagacacctttgcaaccctgtgcagccaggagctgagactggcatcgtacctggcgaggatggccatggtgcccggggccacgcttcgccggctcctgagtgtggtactgcccacagcctcacagcctcagctgctggccctgctggattcggccaccgagagacatgtggaccacgcagctgagagcgatggcggagcggagcaggccgacgtgggcaggcggaggaaacaccagagctggtggcaagccttagatggcaaactgcgaggagatctgataagcagaggattagaaaagatgctgtgggcccgcaagagaaagcagagcatattaaagaagacatgtctccctctcagagagaggatgatattctctggaaaaggaagttggccacacctgtcactggagcccattggcgaactggcccctgtacccattgtaggggcagaaaccattgatctattaaacacaggagagaagctctttatattcagaaatccaaaggagccagagatctcactgcacgttcctcccaggaaaaagaagaactttttgaatgccaaaaaggccatgagggccttgggcatggactagcccaagggaaagacctgcgggagcatctgaagagagaagggatgattttctcctgcccgccggtgtttgtgtgtttataatgcacaactcgcaaatataaattgcacatgcagaaggcacagaccccgtagcgcatgccaacttgcagggactcggtttaatcttgtctcatgaatttccagatggcccactctcttccatatcacaaggacataaacactccttctttcagccccacctccccagggccctggaggagacccccaccctgcaatccacaccccatcctctgctgcagaagctatggtctgtgtggtgacagccagattctctactcttatgttttgtatttgttacatattctatttttataaagggaattttaaaaaataaatgtgttttgcacaaagctgtttattacaaaa

SEQ ID NO: 434 - DNA, 7408 bp, Homo sapiens
atgaatgatggtgacacagtacaagaatacagtggccggctggaaagggctcccactggccaaatacgggacaatttaagcagcaagagaatcacgaagacatactgggatgttggcacaacccctacgctggttctttggcccatagttctgatggtacaaggacgagttcagcagccacagtctgaaaagggcctggaaaccaggggctcagacctgcacatgagggtctgcatcatgccaccaaataagctactgagaccagaagtgagagaaatgtttgaaattttccgaaataaaatcccctcccctatacacagaaaggcaaatgaagaggaacaaacacccagggtggcggcggtgagcgccccagcacctgccgccctgggcgcctcctccacctgcgcgccccacgcccgcttccggccggcttccaggcctcagaggcgatcccgaggaatcgttccgctcccaaggggcggagctttctcatcgccgcgctcggcattcggcttatgctgcctcgccccggcggccgtccagcgggaggcggagcgagtccaaaatggcggctctcaggctggcgcgctccgtgctgctggggctttgaggtggtcgccgggggtccgggggaccctttccccgccgcggaagccctagaggatgaatcggggaccctgctaaggtctggcggcggggctggagagcagtggcagcaagggctgcggtggcgtccacgcagcgggatgtgcgagagttactccaggtcgttgttgagggtctcggtggcgcagatctgccaggcgctgggctgggactcggtgcagctcagcgcctgccacctcctcacggacgtgctgcagcgctatctgcagcagctgggccggggctgccatcggtactctgagctctatggccgaacagacccaattttggatgatgttggtgaagctttccagctgatgggggttagtctacatgaactagaagactatattcacaacattgagcctgtcaccttcccacaccaaattccgtcatttcctgttagcaagaacaatgtacttcagtttcctcaacctggaagtaaagatgcagaggaaagaaaagaatacattcctgattacctgccacccattgtgtcttctcaagaagaagaagaagaagagcaggtgcccactgatggaggcacatcagcagaagccatgcaggttcccttggaagaagatgatgaattggaggaggaagaaattattaatgatgagaatttcctgggcaagagaccactggatagtcctgaagctgaagaactgccagccatgaagcggcctcggctattaagcactaaaggggacacgctagatgttgtgttattggaagctcgagagccactcagctcaataaatactcaaaagatcccaccaatgctttctccagtccatgtacaggacagtacagacttggcacctccctcacccgagccgccaatgttggctccagttgcaaaatcacaaatgccaactgcaaaaccattagaaacaaagtcatttacacctaaaacaaagactaaaactagctctccaggacagaagactaaatcacctaaaaccgcccagtcaccagcaatggtcggaagtcctattcgatcaccaaaaactgtatccaaagaaaagaaatcacctggacgttccaagagccccaagagtcccaagagccccaaggtcacgactcacattccccaaacacctgtgagacctgaaacgcccaacaggactccttcagctacactcagtgaaaaaatcagtaaagagactatccaggtaaaacaaatacagacaccccctgatgctgggaaactgaacagtgagaatcagccgaaaaaggctgtggtagcagataaaacgattgaggcctctatcgatgctgtgattgcacgagcctgtgctgagcgagagccagatcctttcgaattttcttctggatcggaatctgaaggagacatttttactagccctaagagaatttcaggcccggagtgtactactcccaaagcttccacttccgcgaacaatttcacaaagtcaggatccactcctctgcctctttccggtggaacctcaagttccgataactcatggacaatggatgcctccattgatgaggttgtacgtaaagcaaaactgggaacaccttcaaatatgccccccaactttccttatatctcttctccgtcagtgtctcctcccactcccgaacctctccacaaggtgtatgaggagaaaaccaagctgccttcctccgtggaggtaaagaagaagttgaaaaaggaactaaagactaaaatgaaaaagaaagaaaagcagagagatagggagagggaaaaagacaagaacaaggacaaaagtaaggagaaggataaagtgaaagagaaagagaaagacaaggaaactggcagggaaacaaagtatccctggaaggaatttcttaaagaggaagaggcagatccctacaagtttaaaatcaaagaatttgaagatgttgatcccaaagtgaaattgaaagatggacttgtgaggaaggagaaagagaagcataaagataagaagaaagatagagagaaaggcaagaaagataaagataagagagagaaagaaaaagtgaaagataaaggcagagaagataagatgaaagccccagcacccccactggtgttgcccccaaaagagttggccctgcccttgttcagccctgccacagcctccagggtcccagccatgctgccatctttgttgccagtgcttccggaaaaactgtttgaggagaaagagaaggtgaaggagaaagaaaagaaaaaggacaaaaaggagaagaagaaaaagaaggaaaaagagaaggagaagaaggagaaggaaagagagaaagagaagagagagcgagagaagagagaaaaagagaaggagaaacacaagcatgaaaaaataaaagtggaaccagtcgctctggccccgagtccagttatccccagattaactctccgagtcggtgctggccaagacaagattgtcatcagcaaggtggtccctgcccccgaggccaagccggcgccctcgcagaacaggccgaagaccccaccgccggcccccgcgcccgcccccggccccatgctcgtcagccctgcgcccgtgccgctgccgctgctcgcccaggccgccgcgggccctgccctgctgccctccccgggtcccgccgcctccggggccagtgccaaagcccccgtgcgcagcgtggtgactgagacggtcagcacctacgtgatccgagatgagtggggcaatcagatctggatctgccctgggtgtaacaagcctgacgatgggagtcccatgattgggtgtgacgactgcgatgactggtaccactggccctgtgttggaatcatgactgcacccccagaagagatgcagtggttctgccccaagtgtgcgaacaagaagaaggacaaaaagcacaagaagaggaagcatcgagcccactgacgactcccgaggggctggaccaagcggggtcagcccgggcttcttccctggcgcctctggaagggagctggtgcaagtctgccgtcacatccacccccagatgcctgtggataaagaacccaggaggactgaggctggaacacaccgcgcacctggattgttcactcccgagccgccttggcctgtggctccgtggcagtgcgacagaaggaaactcaagcagaggcgtggcctgggggctgcccctcctccacttctctaataccagtgacaagtattattaataaagagcgtacatcttcccttttgatttcctttattctctccagggccttttcattgaggtattagatgagaagataatgtacaaactgcctcaactgtaatttaaggatgatagagtctgtatacagttttcagcccctttccctctatagtaagataatcagaataacataaaagaaaactccagttggagtaccggtaaatatttttgtgataagaatatatgaagcttccctccttcccccgtttttagtactaacatgtaaaatgttcaggcttttgtgaaataccttatattttttaagaaaaaggtttctatcatgtcctgtttgcttttgtgcaaattatttttgtttaatgtattttatatcttcgttgcattctaattttgcccttctttaaactgctggagtctcttctcactgcttgtacatttcatcaacttgtataaaaactcttcagactaaaagattgcccctaatgtaaataataaatatttatgaagtagttattttttaaatttttatcgtgtttaattctggctttctctgaaatccactgtgatttcagccaggtctgtaatgacgctggacagaaacaaggctagagaaaaagccatcgttcaaagaaatttcccttgagctcagcctgcgcagtgcccggaaacatggtggggaaagggcccgagcagttggaaggaaaacaaggcaatttaaatttagagtttatgacttgaagttgttttgtttgttgtctattttgtttttgtaaatttctttgacagacttttactaaaaggacatgtagtttccatgaaagtaaaaaaaaaaaacaacaaaaaacccacatatactgtagcattttgtctttatattgttttatttctacaaatctgttcattaatattgtgctttaaggctgaaatgaagtatattatgaatttttttaagaaaactcatcaaatttcagggtatcacaaaactttattatattattatactgcccactatttattatatgttatagatgtctgagaggtaaaccaaatattttatttttaatgttaaaaaaacatcaaatttaactttattagcatattttagcaactttgggataaatacggacttttacttgattttgaaataatcccagtgtaggcccatgtgctggatctgttggatgctagaatatgggctttgaacctaatacaaatatattactagaaaatgtgatttttttaaatgccaagtaaattgatattagtgtatgaattagtcatattttaaaacattatgtggttagagaaatgcggttttctgccatgaatgttaagttgcaaatcagtggaaatggagtcgacctcttcggagcacagggtgtcattgccctcgttgttcaagaggccagaatttttctatccccgctaagaaacaaagcatctatgttgagatatgtgtttttttgtttgattaatttgagatcattctaaatactttatacaatattttcacatgcacaaaaatgcgcgttagtggtttttggagaggggtgaggggtgggggaagtgcaaaataaagattattggctatttcatagtttgcttttccattttctttatttaggatttagttccttgaggcgtggtccatgatctgaagttgccacgtttaagtgagcaggtcacgctactgaaatcagaatggaggtgcctatatataactttccccccaatcttactgtctgagagacttcagcccatgctacatttaaggaatttcaatcagtttgttgtcccttgctatttcatggttgctttcctaaatccagttcatgattttataaatggtctttgcaataataaaaccaaagaatcattttcagggggctggagagctcgagggattagtaatggaatacagagcctttcacctctaggtcagtgagtcggatccagtccaggtcactagagaccaaaagttgtcaccatcttatgactgttcagtggcctgtgtgaaatgaactggtggtctcagtctctactgggtggctggctgtgacaccaaccaaaggaagttcaagaaactgcaaagagaaatgtggattagaaaataaaacatccacattacaaagaaaaagttagaaagttgggcgtagtcattctccagaaagtaataccgaagaaaaaagagcaacttacaaataccacagacaaacagagattaatttactttccttaatgaagtcaagcaaaaccggaaaagaaaagcctatattgggtgagaggggagagggttaagtggggaggatgatttgatcagaagaaaaagttcagggacccaaacatcagggaaaaatgggttttgacttttgagggagaaggaaatcgcaacagcagcaatttgaggaactactgtagcagaattcgacacaaaggaatgagaagtatttccctttagagggcttgcagtgttccagttggaagcaaaaccctgaccggctttcatttagcccagcactgtcatttgaatagcatcaatactttattaagagaagtaatgcggggggggcggggattgtcctgactagtgattttattgagggagatggtatttgagaaacagaccctcacctcatgaaaccgagacgctcttctggtgtgatgatctgccgtcagagccagatggaactggcagagcttaatttctgtggctgacaaggtgtttctcttccaaaggtgtctacagtgaggcacagtgaggatctttatcccctgactgatttgtggttccaaatgtcctggagaaaaccagaggctatcagagtcttctgactttgtcgggcttttttcagagataaaatatagtgcattactctcctgtatcacctaaaccgcctttgttctcctttcaatgggatgattaaacaaagacctactaaccaaattaaagtataaaatgaacactgagatatggaaaccttgccactaagaatgctaatgaaaaaagttcactaaagccacgctggctatgttttcaatacaaatagttttatggccaatctctttagatcatagcagttttctttagaagtgtaagtctaaaagtagatgagttaccttgacggaagaatgaaacagataatgtcctgaataatgtctctttccacaatggtatcagtcattctgttaggaaactatttctttgagaatcttgcgttcgctgcagcctaaaaagtataaagtaactattaatccatgtgtgcaggcgagtagatgacatcgaaatgagatatttaggtggacagcttgttcatttaatctacatatgagttattaaaatggctagtggttatttttttcgttctgggcaactcagttttaaatttagtttgaagaacattgttacatggtttcattcatttcgtccacatttgctacgcacgttttttggaaatggcaatgatgtatcagaaccaagttcatttccagttgcctggtttctgagctgctctagcccttccgctggctccatgattttggaattgttcccaaagtatactatgtattaaagtgtattgcatgaaattct

SEQ ID NO: 435 - DNA, 1236 bp, Homo sapiens
agtctgagcccagagagccgcggggaccatggagccggtgccgctgcaggacttcgtgcgcgccttggaccccgcctccctcccgcgcgtgctgcgggtctgctcgggggtctacttcgagggctccatctatgagatctctgggaatgagtgctgcctctccacgggggacctgatcaaggtcacccaggtccgcctccagaaggtggtctgtgagaacccgaagaccagccagaccatggagctcgcccccaacttccaggtcttctcaagtcttaggattgcagcaacacgctcggctgcccaaacccaaggcgaagaccttgccagagttcatcaaggatggctccagtacgtacagcaagattcctgcccacaggaagggccacaggcccgctaagccccaaaggcaggatctagatgatgatgaacatgattatgaagaaatacttgagcaatttcagaaaaccatctaagtgctggaggaaccacgcttcctaactgctgcttctcagggaatccgacaccagccaaccattttaagcctctaaaagacctcgggcaagtctcacagaaactgagctgcagacggggagtagctttgtggaaactgatttgatggacactgcaccagcttccttcaggttctagattcttgctacttagggcgggctggtttggacctaacatctcgcacgtgactccctcagcctcagagccttgggatgcagagcagctggcagggttcctctcaatcctgcaaccccagctgtcccaccggtggatgcagaggggaatccgaggccatcaaccttggtgacagcagcgcagtgccaatgctgatcacactgcatgggagattttgttaacgtctgccacccccactctcacccccaagctctaagcccccgggaggcctggactgtcttcctcatctctgtagcaccaagcctgatagatctgtatatggtaaacaggggtttaaccacatgtggttaacatggattaatgtgggaacttggcttcaagaacacaaccttaggaccttgggccccaaaagctggtggtgaaatgaggaggagccaatttaagaagacccttatggagacctgaggctgcagaaactggtaggtttcatcaggtggttaaagtcgtcaaagttgtaagtgactaaccaagattatttcattttaaaaccatagaataaaaatgacacctgagcttctctatgaatga

SEQ ID NO: 436 - DNA, 3610 bp, Homo sapiens
ggagaattccaccctctttcattctggggagaagaagttaaaattagggccagccctgcgggactgacatgccagatgcagggaagctgtccccagaaataagcgagttcccaccgcggctgggcggggcgggagcctcgggtcccaacccagcggagggactcctggaaggcctgccccttccaagtgtctgcaagggctctggtcccaagctttaaaatcctgagcgaaggcactgcgggccgacctctcctctcccagccagtcgtggctggcctttcaaagtgtgcagttgtctcctccctgtccagccccatcgtcgcccaggaccagctgggccgcggtctgacctgaggctgctgctcagcgccggggcgctggcgctctccattcgagcaccttccagcataccgctcggctccgggagccgctctgcaaagttgggcagctcagagcgcaagctttgcctctcgacttctccctccttgggtccccggcgcccccgcctcccacgatccctttcactaggagcagccagtcccagcgggctggcaacttgcaccccttcctagtcatcctccctgaaacgcgaccatgctgttaaggggcgtcctcctggcgttgcaagccctgcagctcgccggtgccctcgacctgcccgctgggtcctgtgcctttgaagagagcacttgcggctttgactccgtgttggcctctctgccgtggattttaaatgaggaaggccattacatttatgtggatacctcctttggcaagcagggggagaaagctgtgctgctaagtcctgacttacaggctgaggaatggagctgcctccgtttggtctaccagataaccacatcttcggagtctctgtcagatcccagccagctgaacctctacatgagatttgaagatgaaagctttgatcgcttgctttggtcagctaaggaaccttcagacagctggctcatagccagcttggatttgcaaaacagttccaagaaattcaagattttaatagaaggtgtactaggacagggaaacacagccagcatcgcactatttgaaatcaagatgacaaccggctactgtattgaatgtgactttgaagaaaatcatctctgtggctttgtgaaccgctggaatcccaatgtgaactggtttgttggaggaggaagtattcggaatgtccactccattctcccacaggatcacaccttcaagagtgaactgggccactacatgtacgtggactcagtttatgtgaagcacttccaggaggtggcacagctcatctccccgttgaccacggcccccatggctggctgcctgtcattttattaccagatccagcaggggaatgacaatgtcttttccctttacactcgggatgtggctggcctttacgaggaaatctggaaagcagacaggccagggaatgctgcctggaaccttgcggaggtcgagttcaatgctccttaccccatggaggttatttttgaagttgctttcaatggtcccaagggaggttatgttgccctggatgatatttcattctctcctgttcactgccagaatcagacagaacttctgttcagtgccgtggaagccagctgcaattttgagcaagatctctgcaacttttaccaagataaagaaggtccaggttggacccgagtgaaagtaaaaccaaacatgtatcgggctggagaccacactacaggcttagggtattacctgctagccaacacaaagttcacatctcagcctggctacattggaaggctctatgggccctccctaccaggaaacttgcagtattgtctgcgttttcattatgccatctatggatttttaaaaatgagtgacaccctagcagtttacatctttgaagagaaccatgtggttcaagagaagatctggtctgtgttggagtccccaaggggtgtttggatgcaagctgaaatcacctttaagaagcccatgcctaccaaggtggttttcatgagcctatgcaaaagtttctgggactgtgggcttgtagccctggatgacattacaatacaattgggaagctgctcatcttcagagaaacttccacctccacctggagagtgtactttcgagcaagatgaatgtacatttactcaggagaaaagaaaccggagcagctggcacaggaggaggggagaaactcccacttcctacacaggaccaaagggagatcacactactggggtaggctactacatgtacattgaggcctcccatatggtgtatggacaaaaagcacgcctcttgtccaggcctctgcgaggagtctctggaaaacactgcttgacctttttctaccacatgtatggagggggcactggcctgctgagtgtttatctgaaaaaggaagaagacagtgaagagtccctcttatggaggagaagaggtgaacagagcatttcctggctacgagcactgattgaatacagctgtgagaggcaacaccagataatttttgaagccattcgaggagtatcaataagaagtgatattgccattgatgatgttaaatttcaggcaggaccctgtggagaaatggaagatacaactcaacaatcatcaggatattctgaggacttaaatgaaattgagtattaagaaatgatctgcattggatttactagacgaaaaccatacctctcttcaatcaaaatgaaaacaaagcaaatgaatactggacagtcttaacaattttataagttataaaatgactttagagcaccctccttcattacttttgcaaaaacatactgactcagggctctttttttctttttgcatatgacaactgttactagaaatacaggctactggttttgcatagatcattcatcttaattttggtaccagttaaaaatacaaatgtactatattgtagtcattttaaagtacacaaagggcacaatcaaaatgagatgcactcatttaaatctgcattcagtgaatgtattgggagaaaaataggtcttgcaggtttccttttgaattttaagtatcataaatattttttaagtaaataatacggggtgtcagtaatatctgcagaatgaatgcagtctttcatgctaatgagttagtctggaaaaataaagtcttattttctatgttttattcatagaaatggagtattaatttttaatattttcaccatatgtgataacaaaggatctttcatgaatgtccaagggtaagtcagtattaattaatgctgtattacaaggcaatgctaccttctttattccccctttgaactacctttgaagtcactatgagcacatggatagaaatttaacttttttttgtaaagcaagcttaaaatgtttatgtatacatacccagcaacttttataaatgtgttaaacaattttactgatttttataataaatattttggtaagattttgaataatatgaattcaggcagatatactaaactgcttttatttacttgtttagaaaattgtatatatatgtttgtgtatcctaacagctgctatgaaattataaaattacctaataaaaataatttgaaaatcttaaaaaaaaaaaaaaa

SEQ ID NO: 437 - DNA, 1756 bp, Homo sapiens
cggctgccgcggagtgcgatgtggtaatggcggcgaccgagccggagctgctcgacgaccaagaggcgaagagggaagcagagactttcaaggaacaaggaaatgcatactatgccaagaaagattacaatgaagcttataattattatacaaaagccatagatatgtgtcctaaaaatgctagctattatggtaatcgagcagccaccttgatgatgcttggaaggttccgggaagctcttggagatgcacaacagtcagtgaggttggatgacagttttgtccggggacatctacgagagggcaagtgccacctctctctggggaatgccatggcagcatgtcgcagcttccagagagccctagaactggatcataaaaatgctcaggcacaacaagagttcaagaatgctaatgcagtcatggaatatgagaaaatagcagaaacagattttgagaagcgagattttcggaaggttgttttctgcatggaccgtgccctagaatttgcccctgcctgccatcgcttcaaaatcctcaaggcagaatgtttagcaatgctgggtcgttatccggaagcacagtctgtggctagtgacattctacgaatggattccaccaatgcagatgctctgtatgtacgaggtctttgcctttattacgaagattgtattgagaaggcagttcagtttttcgtacaggctctcaggatggctcctgaccacgagaaggcctgcattgcctgcagaaatgccaaagcactcaaagcaaagaaagaagatgggaataaagcatttaaggaaggaaattacaaactagcatatgaactgtacacagaagccctggggatagaccccaacaatataaaaacaaatgctaaactctactgtaatcggggtacggttaattccaagcttaggaaactagatgatgcaatagaagactgcacaaatgcagtgaagcttgatgacacttacataaaagcctacttgagaagagctcagtgttacatggacacagaacagtatgaagaagcagtacgagactatgaaaaagtataccagacagagaaaacaaaagaacacaaacagctcctaaaaaatgcgcagctggaactgaagaagagtaagaggaaagattactacaagattctaggagtggacaagaatgcctctgaggacgagatcaagaaagcttatcggaaacgggccttgatgcaccatccagatcggcatagtggagccagtgctgaggttcagaaggaggaggagaagaagttcaaggaagttggagaggcctttactatcctctctgatcccaagaaaaagactcgctatgacagtggacaggacctagatgaggagggcatgaatatgggtgattttgatccaaacaatatcttcaaggcattctttggcggtcctggcggcttcagctttgaagcatctggtccagggaatttcttttttcaatttggctaatgaagggcaaccacccagaacccagaaaatgcagattcactcagtttaatcttgaatgtggaaacagttcacctcctcccttcatcacgtctccgtgtgcttagagcagtttcgttttctcagttggatgccctgtgtctctgtgagtggggtggagcaaagggaaccaatgccgaagaccgagggcaggggagggaggcgggggtggacagggaggcagcttgtgaatttttgttttactgtttaactttattaaaaaagaaaaaaaaaaaaaa

SEQ ID NO: 438 - DNA, 7370 bp, Homo sapiens
atgccagggagccaagcgtcctgcccggccgttgctccgactgtgtgttccaggagtggtggctctgaggtgtgaccctgcccacgtttgggcccagccaggttcagccccccaataaggagggcagcttgataacacaaagaaaacagtgtcaacgagtactaccaagagaagaagacaagaggtcaacacagactcattttctactccgtgtgaatgatagctacagcaggggaaagtttcatagtctatcagtgggtcagaaaatggagttttatagcagaggcttcttagaagcttaaacccctgtcccaatgacgtcaagttcgcccgctggcttggaaggttcagacctatcttccatcaacaccatgatgtcggcggtcatgagtgtagggaaggtcacagagaatggcgggagcccccaggggatcaagtccccctcgaagcctccaggaccaaatcggattggcagaaggaaccaggaaacgaaagaggagaagtcttcctataactgccccctgtgtgagaagatttgcactacccagcaccagctgaccatgcacattcgccagcacaacacagacactggaggagccgaccactcatgcagcatctgcggaaagtcactgagctcggccagctccctcgatcgccacatgctggtgcactctggcgagaggccttacaagtgcactgtgtgtggccagtcatttaccaccaatgggaacatgcacagacatatgaagatccatgagaaggaccctaacagtgccacagccacagcccctccatctcctctgaaacgtaggcgattgtcctccaagaggaaactgagtcacgatgccgagtcagagagagaagacccagcaccagctaaaaagatggtagaagacgggcagtcaggtgacttggagaagaaagctgatgaagtctttcactgcccagtatgtttcaaggagtttgtttgcaagtatggactggagacccacatggagacccattcagataacccactaagatgtgacatttgttgtgtcacctttcgaacacatcgaggactgctgcgtcacaacgcgcttgtccacaaacaacttcccagggatgcaatgggcagacctttcatacagaacaacccttcaattcctgctggcttccacgacttaggattcacggacttctcctgtaggaagtttcctcgcatttctcaggcctggtgcgaaacaaacctgcggaggtgcatcagcgagcaacaccgttttgtctgcgacacctgtgacaaggcgttccccatgctctgctcactggctctgcacaagcagacccatgtggcggcagaccagggtcaagaaaagccgcaggccacgcccctgcctggtgacgccctggaccagaagggcttcctggccttgcttggcctgcagcacaccaaagacgtcaggcctgcccccgccgaggagcccctgccggatgacaaccaggcaattcagctccagacactcaagtgtcagctacctcaggaccccggctgcaccaacctgctgagcctgtcacctttcgaagctgcttccctaggcggttctctcacagttctccccgcgaccaaggacagcataaagcacctgtccctgcagcccttccagaagggcttcatcatccagcctgacagcagcattgtggtcaagcccatctctggcgagtcggccatcgagctggcagacatccagcaaattctgaagatggcagcctcggctccccctcagatcagtcttccgcccttctccaaggcccctgccgccccactgcaggcgatcttcaagcacatgccccctctgaagccaaagcccctggtcacaccacggacggtggtggccacctccacgcccccgcctctcatcaacgcccagcaggcttccccgggctgtatcagccccagcctgccgccaccgcccctgaagctcctcaaaggctcagtggaggcggcctccaacgcccacctgctgcagtccaagtccgggacccagccccacgcggccacgcggctctccctgcagcagccgcgggcggagctgccgggccagcctgagatgaagacgcagctggagcaggacagcatcatcgaggccctgctgccgctgagcatggaggccaagatcaagcaggagatcacagagggggaactcaaggccttcatgacagcgcccggcggcaagaagacgcccgccatgcgcaaggtgctctacccctgccgcttctgcaaccaggtgtttgccttctcgggggtcttgcgtgcccacgtgcgctcccacctgggcatctcgccataccagtgcaacatctgcgactacatcgccgccgacaaggccgcgctcatccgccacctgcgcacgcacagtggggagcggccctacatttgcaagatctgccactaccccttcactgtcaaagccaactgcgagcggcacctgcgcaagaagcacctcaaggccacccgcaaggatatcgagaagaacatcgagtatgtgagtagcagcgcggccgagctggtggacgccttctgcgccccggacaccgtgtgccggctgtgcggcgaggacctcaagcactatcgtgccctgcgcatccacatgcgcacgcactgcggccgcggcctgggcgggggccacaagggccgcaagcccttcgagtgcaaggagtgcagcgccgcgttcgcggccaagcgcaactgcatccaccacatcctcaagcagcacctgcacgtgcccgagcaggacatcgagagctacgtgctggccgccgacggcctgggccccgcagaggcgccggccgctgaggcgtcggggcgcggggaggacagtggctgcgctgcccttggtgactgcaagcccctcactgccttcctggaaccccagaacggctttcttcacaggggccccacccagcctccacctccccatgtctcgatcaagttggagcccgccagtagctttgcggtggacttcaatgagcccctggacttctcgcagaagggcctggccctggtccaagtgaagcaggaaaacatctcctttctgagcccttcttccctggtcccctatgactgctccatggagcccatcgacctgtccatccccaagaacttcaggaaaggggacaaggatttggccactcccagcgaagccaagaagcctgaggaggaggcggggagcagcgagcagccctctccctgcccagcacccggcccttctcttcctgtaactttggggcccagcggaatcctggaaagccccatggcccctgctccggcggccaccccggaacccccagcacagcccctgcagggccctgttcagctggcggtcccaatctactcctcagccctggtcagcagccctccactcgtgggcagctcagccctcctgagtggcacagccttgctgcgtccactgcggcccaagcccccgctgcttttgccaaagccccccgtgacagaagagctgcccccgctggcctccattgcccagatcatctcatctgtatcctcggcccccaccctgctgaaaaccaaggtggcggacccagggcccgcaagcactggcagtaacaccacggcttcagacagcttaggaggttctgtccccaaagccgccaccaccgccacccccgctgccaccaccagcccaaaagagtctagtgagcctcccgctccagccagcagcccagaggctgcctctcccaccgagcagggcccagcgggcacgtcgaagaagaggggccggaaaagggggatgaggagccgaccccgcgccaacagcggcggggtggacctggactccagcggggagtttgccagcatcgagaagatgctggccaccacagacaccaacaagttcagtccgtttctgcagacagcggaggacaacactcaggatgaggtggccggagcccctgccgaccaccatgggcccagtgatgaagagcagggcagtcccccagaagacaagctgctgagggccaagcggaactcgtacaccaactgcctgcagaagatcacctgtccccactgtccccgggttttcccttgggccagctccctacagaggcacatgctcacacacactgacagtcagtcggatgcggagactgcagccgccgcgggcgaagtgctagacctcacctcacgggacagagagcagccgtcggagggcgccactgagctccgccaggtcgcaggggatgcgcctgtggagcaggccacggcggaaacggcctcgccggtgcaccgggaagagcacgggcgtggggagagccatgagccggaggaggagcatggcactgaggagagcactggggacgccgacggcgcggaagaggacgcgtcgagcaaccagagcctggacctggacttcgccaccaagctcatggacttcaagctggcggagggcgacggcgaggcaggcgccgggggcgcggcctcgcaggagcagaagctcgcctgcgacacctgtgggaagagcttcaagttcctgggcaccctgagccgccaccggaaggcgcacggccgccaggagcccaaggacgagaagggagatggcgccagcactgcagaggaggggccccagcccgcccctgaacaggaggagaagccccccgagaccccggcagaggtggtggagtcggccccgggtgccggggaggccccggcggaaaagctcgcggaggagacggagggcccctccgacggggagagcgcggccgagaaaaggtcctcagagaagagcgacgatgacaagaaaccaaagacagactcccccaaaagcgtggccagcaaggcagacaagaggaagaaggtctgcagcgtgtgcaacaagcggttctggtcgctgcaggacctgacccggcacatgcgctcccacacaggggaaaggccatacaaatgtcagacctgcgagcgaaccttcaccttgaagcacagcctggttcgccaccagcggatccaccagaaagccaggcatgccaaacaccacgggaaggacagcgacaaggaagagcggggtgaggaggacagcgagaatgagtccacccacagcggcaacaacgccgtctcagagaacgaggctgagctggctcccaatgccagcaaccacatggctgtcacccggagccggaaggagggcttggccagtgccaccaaggactgcagccacagggaggagaaggtcacggcagggtggccgtctgagcctggccagggtgaccttaacccagagagcccggcggccctggggcaggacctgctggagccgcgcagcaagaggcctgcccacccaatcctggccacagctgatggcgcctcccagctcgtggggatggagtgacagcctcagtccccctcagcacagacaaaagccagcagagcaaagcgtctatacttcatggggtttcctcagtgccctttggctgttgaggagtgagagagagagagagagagagagagagagagagagagagacaagcaggagcgtggctgctcgctcagtgccatagccttaccgcagcctgcgcgggaggccacagcccgtgccgattccagtgccttaactacttaccggatccctccatattatcatgggtgttgtatttttccaaaatgacttcttaaacaaaacaaatattataatgaattgtctggagaggacctcttcatttgagcattagcgttattttgtattggtgtgtgtgagcttgttcttgtgaatctgtgatagcaccgtttgttctgtgagctggaaacagaaggaaaaaacatacccttgggtacccatagccaataactggaagaaaatgatgtgaatttcatgtaaatgaccagaggaaagatggataagatgataatttcttaaatagacattttccttttttctttgtgcttcatggtggagctgtcatctggtccttggtattacaggatgtggttgatgaaggtttccaatatggtttcaggccaaaaccagggaagattctagcttcagcctcatgtccatttccagtctgtcagcattagacatggtcactgttcaagtttcaagacatccattcttaactatagagaagagttactcccctggcgtcttaacctatggaaaacatgcacggataggatatatttgattgcctcctcttccctttcagtatatgtattattaatattattattattattattattattagttcatcagtttgctgttctctgcagtgagcagaatcaaatgggcaatatttgtcctgggagacctgtgccgcacccaggtccccgtgttaacgtgtgcctgcggttgtggttggcaccctcgggtggtagctcttctactgtaatgagacaagcctttcttctgtcactgcagaatttagaaggggccgtgagcagtcttcccaagcatggtccaggagcagctcagagagggtggagtgaggatgcatgcatccagggaacaggcatcaagaagccagggccgtgcctggagcactgcagagatgactttggagaaagcaaagcagtgacccagtgaccaggcacattactcgtgagcgaggtattcccagtcttcctgctaagcctaatccaagccttacccagctgtgctactgtcatttgcaaagcaaggaaatactactactggtaataaaactacactagcaagatgtcagataagaaataggtttatatttaccttcctgcgatgtggggttggtgcttgaagataaatgtgctgtttctagtttcttaaatagcccacacccctggatgcaaaaaggcagggttatttttacccatgagcatcctgtgcaggcaatagacttccctcactgtctccgcctgcagggaggagaatgtaccccactgcacctgagctcctggtccctcagccaagacctcaggggtccccagccagcctgctgctggggacccctgtgcttgctgcagtgtatggagcctcttgccttcccctggggaggcacccctgtaccccagcttccttcccctggccttttctggccccagtgctcctcctttacatagacttgttcacacagaaacgtgcacgcccccttttctccgccacttcaccagtttctgaaatccaacctcccagacttcacaggaagatagatattcttgagataatgaaaagtgatatcttcgcatacgaaaggaaaaaaggttgaggtatatatgatttttaactgtattaggggtgtatgaaccagtttaaaaacgaggttttatttactgtagagatgaatgcaaatcagaaccaatgatcccttggcctacttagttaaaaccagttcatacatcccttagg

SEQ ID NO: 439 - DNA, 3376 bp, Homo sapiens; identical to SEQ ID NO: 53

SEQ ID NO: 440 - DNA, 5293 bp, Homo sapiens
caagagcggaggaccaggaaccagagagagagagagagaaaagagagaggagagacagagcgcttgggggcgaaaggagagagggagggaagggtgggtaaggaggagagagcggtctgctgcaaaccccaggaggagagcttggagcccaagccagaactcgagccctagccggagccgttcacagggaggcggctgccgggaccgtcagccctgcatgatgcatctccggctcttctgcatcctgctcgccgcggtctcaggagccgagggctggggctactacggctgcgacgaggagctggtgggtcccctgtatgcacgctccctgggcgcctcctcctactacagtctccttactgcgccgcgattcgccaggctgcacggcataagcgggtggtcaccacggattggggatccgaatccctggctccagatagacttaatgaagaagcaccggatccgggccgtggccacacagggctcctttaattcttgggactgggtcacacgttacatgctactctacggcgaccgagtggacagctggacaccgttctaccagcgagggcacaactcgaccttctttggtaacgtgaacgagtcggcggtggtgcgccatgacctgcacttccacttcactgcgcgctacatccgcatcgtgcccctggcctggaacccacgcggcaagatcggcctgaggctcggcctctatggctgcccatacaaggccgacatactctatttcgacggcgacgatgccatctcctaccgcttcccgcgaggggtcagccgaagcctgtgggacgtgttcgccttcagcttcaagaccgaggagaaggacggtcttctgctgcacgccgagggcgcccagggcgactacgtgacgctcgagctggagggggcacacctgctgctgcacatgagcctgggcagcagccctatccagccaagaccaggtcacaccaccgtgagcgcaggcggagtcctcaatgaccagcactggcactatgtgcgggtggaccgatttggccgcgatgtaaatttcaccctggacggctatgtgcagcgctttattctcaatggagacttcgagaggctgaacctggacactgagatgttcatcggaggtctggtgggcgccgcgcggaagaacctggcctatcggcataacttccgcggctgcatagaaaacgtaatcttcaaccgcgtcaacatcgcagacctggccgtgcggcgccattcccggatcaccttcgagggtaaggtggcttttcgttgcctggacccggtaccgcaccctatcaacttcggaggccctcacaacttcgttcaagtgcccggtttcccacgccgtggccgcctggcagtctcatttcgcttccgcacctgggacctcaccgggcttctccttttctcccgtctgggggacgggctgggccacgtggagctgacgctcagcgaagggcaggtcaacgtgtccatcgcgcagagcggccgaaagaagcttcagttcgctgctgggtaccgactgaatgacggcttttggcacgaggtgaattttgtggcacaggaaaaccatgcagttatcagcattgatgatgtggaaggggcagaggtcagggtctcatacccgttgctgatccggacagggacctcatatttctttgggggttgtcccaagccagccagtcgatgggactgccactccaaccagacggcattccatggctgcatggagctgctcaaggtggatggtcaactggtcaacctgactctggtggagggccggcggcttggattctatgctgaggtcctctttgatacatgtggcatcactgataggtgcagccctaacatgtgtgagcatgatggacgctgctaccagtcttgggatgacttcatttgctactgcgaactgacgggctacaagggagagacctgccacacacctttgtataaggaatcctgtgaggcttatcggctcagtgggaaaacttctggaaacttcaccattgatcctgatggcagtggccccctgaagccatttgtagtgtactgtgatatccgagagaaccgagcgtggacagttgtgcggcatgacaggctgtggacaactcgagtgacaggttccagcatggagcggccattcctgggggctatccagtactggaatgcatcctgggaggaagtcagtgcccttgccaatgcttcccagcattgtgaacagtggatcgagttctcctgctacaattcccggctgctcaacactgcaggaggctacccctacagcttttggattggccgaaatgaggagcagcacttctactggggaggctcccagcctgggatccagcgctgtgcctgtggtctggaccggagctgtgtggaccctgccttgtactgcaactgtgacgctgaccagccccagtggagaactgacaagggactgctgacctttgtggaccatctgcctgtcactcaggtagtgataggggatacgaaccgctccacttctgaggcccagttcttcctgaggcctctgcgctgctatggcgatcgaaattcctggaacaccatttccttccacaccggggctgcactacgcttccccccaatccgtgccaaccacagcctggatgtctccttctacttcaggacctctgctccctcgggggtcttcctagagaatatggggggcccttactgccagtggcgccgaccttatgtgcgggtggaactcaacacatcccgggatgtggtcttcgcctttgatgtggggaatggggatgagaacctcacagtacactcagacgactttgagttcaatgatgacgagtggcacctggtccgggctgaaatcaacgtgaagcaggcccggctccgagtggatcaccggccctgggttctgcggcctatgccactgcagacctacatctggatggagtatgaccagcccctctatgtgggatctgcagagcttaagagacgcccctttgtgggttgcttgagggccatgcgtctgaacggagtgactctgaacctggagggccgtgccaatgcctctgagggtacctcacccaactgcacaggccactgtgcccaccctcggctcccctgtttccatggaggccgctgcgtggagcgctatagctactacacgtgtgactgtgacctcacggcttttgatgggccatactgcaaccacgatattggtggtttctttgagccgggcacctggatgcgctataacctacagtcagcgctgcgctctgcagccagggagttctcccacatgctgagccggccagtgccaggctatgagcctggctacatcccgggctatgatactccgggctatgtgcctggctaccatggccccgggtaccgcctgcccgactacccccggcctggtcggcctgtgcccggttaccgtgggcctgtctacaacgttacgggagaggaggtctccttcagcttcagcaccagctccgcccctgctgtcctgctctacgtcagttcctttgttcgtgactacatggctgtgctcatcaaggatgatgggacccttcagctgcgatatcagctgggcaccagtccctacgtgtaccagctaaccactcgaccagtgaccgatggccagccccatagcatcaatatcacccgtgtttaccggaacctcttcatccaggtggactacttcccactgacagagcagaagttctcgctgttggtggacagccagttggactcacccaaggccttgtatttagggcgtgtgatggagacaggagtcattgacccggagatccagcgctacaacaccccaggtttctcaggctgcctgtctggtgttcgattcaacaacgtggctcccctcaagacccacttccgaacccctcgacccatgactgctgagctagctgaggcccttcgagttcagggagaactgtccgaatctaattgcggagctatgccacgtcttgtttcagaggtgccacctgagcttgatccctggtatctgcccccagacttcccctactaccatgatgaaggatgggttgccatacttttaggctttttggtggcctttctgctgctggggctggtgggaatgttggtgctcttctatctgcaaaatcatcgctataagggctcctaccataccaatgagcccaaggctgcccacgagtaccatcctggcagcaaacctcccctacccacttcaggccctgcccaggtccccacccctacagcagctcccaaccaagctccagcctcagccccagccccagccccaactccagccccagcccctggcccccgggatcagaacctaccccagatcctggaggagtccaggtctgaatgagtcagaagggcttctgggaccaattccagctcctgacattcccccagtcctgcctctcccccatcctatcagggacatttggctcctcttagctggctctgctcatccagaggatattcccccatcccccccccatcaagtttggtgggcagagctacagatgggacccaagggagtggccgagcctcactgcctaaaccaatgcccttctcatccctgtttccccaggctcctggctgtttatctgccccaaaggagaagcctcatggggttgacataggtcctttctgccatctctgttccagctgctgtcagggattaacaacagagtgtaggggagattaactgcctcccttccaatagacactatcagcagggacagatgtgtgggagtgcagggctgcagagggtatggggggaggaggctgctaaaccctatcccccagcctcccccctgccctgaagatcttccatttgcttccactcagctggaggctcaagagggcttgatggctgtcccctgcccccctccttttgttttgtacacagagaccaagaggcctcagtttagcaccttagtacctccgctgcttcacttgctttagccaaagccataaaaaacctgcaacgtagagaaaataatgcagataccctgactagccagccctctactcctccaaccttttccaagatatgcaatggcctttgtgcctgcccaaaggcttcgcccctccagtgcatgaggaaccctctttcctccgctcagagatgctgcttcatttacccaggaggtcatattctttatatatattttttgttgcaaagtgtctctctagagaaactctatatattattcgaatttttaaattatttgtttatatataaaagaaaagctcaattggcaaaaaaaaaaaaaaaaaa

SEQ ID NO: 441 - DNA, 2666 bp, Homo sapiens
ggcagatgccgcctggtccagctatcgtgctcggtattcagttttccggagcagcgctctttctctggcccgcggagcggtcccgcggccgagtaccggattcccgagtttgggaggctctgctttcctccttaggacccactttgccgtcctggggtggctgcagttatgtccgcgctgcgacctctcctgcttctgctgctgcctctgtgtcccggtcctggtcccggacccgggagcgaggcaaaggtcacccggagttgtgcagagacccggcaggtgctgggggcccggggatatagcttaaacctaatccctcccgccctgatctcaggtgagcacctccgggtctgtccccaggagtacacctgctgttccagtgagacagagcagaggctgatcagggagactgaggccaccttccgaggcctggtggaggacagcggctcctttctggttcacacactggctgccaggcacagaaaatttgatgagttttttctggagatgctctcagtagcccagcactctctgacccagctcttctcccactcctacggccgcctgtatgcccagcacgccctcatattcaatggcctgttctctcggctgcgagacttctatggggaatctggtgaggggttggatgacaccctggcggatttctgggcacagctcctggagagagtgttcccgctgctgcacccacagtacagcttcccccctgactacctgctctgcctctcacgcttggcctcatctaccgatggctctctgcagccctttggggactcaccccgccgcctccgcctgcagataacccggaccctggtggctgcccgagcctttgtgcagggcctggagactggaagaaatgtggtcagcgaagcgcttaaggtgccggtgtctgaaggctgcagccaggctctgatgcgtctcatcggctgtcccctgtgccggggggtcccctcacttatgccctgccagggcttctgcctcaacgtggttcgtggctgtctcagcagcaggggactggagcctgactggggcaactatctggatggtctcctgatcctggctgataagctccagggccccttttcctttgagctgacggccgagtccattggggtgaagatctcggagggtttgatgtacctgcaggaaaacagtgcgaaggtgtccgcccaggtgtttcaggagtgcggcccccccgacccggtgcctgcccgcaaccgtcgagccccgccgccccgggaagaggcgggccggctgtggtcgatggtgaccgaggaggagcggcccacgacggccgcaggcaccaacctgcaccggctggtgtgggagctccgcgagcgtctggcccggatgcggggcttctgggcccggctgtccctgacggtgtgcggagactctcgcatggcagcggacgcctcgctggaggcggcgccctgctggaccggagccgggcggggccggtacttgccgccagtggtcgggggctccccggccgagcaggtcaacaaccccgagctcaaggtggacgcctcgggccccgatgtcccgacacggcggcgtcggctacagctccgggcggccacggccagaatgaaaacggccgcactgggacacgacctggacgggcaggacgcggatgaggatgccagcggctctggagggggacagcagtatgcagatgactggatggctggggctgtggctcccccagcccggcctcctcggcctccataccctcctagaagggatggttctgggggcaaaggaggaggtggcagtgcccgctacaaccagggccggagcaggagtgggggggcatctattggttttcacacccaaaccatcctcattctctccctctcagccctggccctgcttggacctcgataacgggggaggggtgccctagcatcagaagggttcatggccctttcccctcctcccccctcagctgggcctggggaggagtcgaagggggctgcagagagggtagagaagggactttgcaggtgaatggctggggccccaaatccaggagattttcatcagaggtgggtgggtgttcacaatatttattttttcatttggtaatgggaggggggcctgggggtatttatttaggagggagtgtggtttccttagaaggtatagtctccagccctctaaggctggggctggtgatcagccccaacagagaaaatgaggagtttagagttgcagctggggaaggggtttgaaggaagttggaagtggggaggggtgggggcatctggtctcagaaatggaccagctggatgcagggcaggggactgagggtgcttgagtaggatgtgagacttcatgggcctgggttctgttgagttttttcagtatcaatttcttaaaccaaattttaaaaaaaacaaggtgggggggtgctcatctcgtgacctctgccacccacatccttcacaaactccatgtttcagtgtttgagtccatgtttattctgcaaataaatggtaatgtattggaaaaaaaaaaaaaaaaaaaaaaaaaaaaaaaaaaaaaaaaaaaaaaaaaaaaaaaaaaaaaaaaaaaaaaaaaaaaaaaaaaaaaaaaaaaaaaaaaaaaaaaaaaaaaaaaaaaaaaaaaaaaaaaaaaaaaaa

SEQ ID NO: 442 - DNA, 4386 bp, Homo sapiens
gctgtgtgcgcaggcgcaagactagcgctcttgggaccggaagttaaggcgttcgcggcgtgtgaatccagggcctgaaaacccagaatgaacttgtgtccatcccagagatcactgcagatgtcatgaggtaccctttgtgtcaccagctcaagcaggcctctggccactttatcatctgtggtggtcctgtgccgtgaccaggaggaaaaattagctctttgaagagaaagtagttctctattgcaggcactggcctcttaaattgttgcaggtggggaatggatgagaatatttgttttgggtgatcagaactgagactcctattgtggattagtaacatgcctcctcctagaacaagggagggcagggatcgccgagaccaccaccgggctcccagcgaggaagaggccttggagaaatgggactggaattgtccagagacgcgtcgcctcttggaagatgccttcttccgtgaagaggattacatccgtcagggttctgaggaatgtcagaagttttggaccttctttgaacgcctgcagagattccagaatctcaagacctccaggaaggaggagaaagaccctggacagcccaagcacagcatcccagcgctggccgacctacctcgcacttacgacccacgttaccgcatcaacctctctgttcttggccctgccacgcggggctctcagggactgggcaggcacttgcccgcggagagagtggctgagttccgccgagccctgttgcactacctggactttggccagaagcaggcatttgggcgtctggccaagctgcagcgtgagcgggcagccctccccatcgcccagtatgggaaccgcatcctgcagacgctgaaggagcaccaggtggtggtagtggccggtgacaccggctgtggcaagtccactcaggtgccccagtacctgctggctgctggcttcagtcatgtggcgtgcacccagccccggcggatcgcctgcatctcactggccaagcgtgtgggctttgagagcctcagtcagtatggctcacaggtcggctaccagatccgctttgagagcacacgttcggcggccaccaagattgtattcctgacagtggggctgctcctgcgacaaatccagcgggaacccagcctgccccagtatgaggtcctgattgtggatgaagtccatgagcggcatctccacaacgatttcctcctgggcgtcctccagcgcctgttgcccacgcggcctgacctcaaggtcatcctcatgtcggccaccatcaacatctcgctcttctccagctatttcagcaatgcccctgtggtacaggtgcctgggaggctgttccccatcacggttgtgtaccagccgcaggaggcggagccgaccacgtccaagtcagagaagctggacccgcggcctttcctgagggtgctggagtccattgaccacaagtacccgcctgaggagcggggtgacctcctcgtcttcctcagcggcatggcggagatcagcgccgtgctggaggctgcccagacctatgccagccacacccagcgctgggtggtactgccactgcacagcgccctgtctgtggccgaccaggacaaggtatttgatgtggcaccccctggagtccggaaatgcatcctctccaccaacattgctgagacctcagtcaccattgacgggatccgcttcgtagtagattccggaaaggtgaaggagatgagctacgatccgcaggccaagctgcaacggctgcaggagttctggattagtcaggccagcgcagagcagcggaagggccgggcgggccgcacgggccccggagtctgcttccgcctctatgccgaatcggactatgatgccttcgccccctaccccgtcccagaaattcggagggtggccctggactcgttggtgctgcagatgaagagcatgagtgtgggggacccccgaaccttccccttcatcgagcccccaccaccagccagcctggaaaccgccatcctctacctccgggaccagggggccctggacagctcagaggccctcacacccattgggtccctgctagcccagctgcctgtggacgttgtgattgggaagatgctgatcctgggctccatgttcagcctggtggagcctgtgctcaccatcgcagccgcacttagcgtccagtcgcccttcacccgcagcgcccagagcagcccagagtgcgcggcagcacggcggccgctggagagcgaccagggtgaccccttcacgctcttcaacgtcttcaacgcctgggtgcaggtgaaatctgaacggagcagaaactctcgcaagtggtgccgccgccggggcatagaggagcatcgactgtacgaaatggccaaccttcggcgccagttcaaggagctgttggaggaccacgggctgctggctggggcccaggccgcgcaggtaggggacagctacagtcggttgcagcagcgccgggagcgccgggccctgcaccagctgaaacgccagcacgaggagggcgcggggcgcaggcgcaaggtgctgcggctgcaggaggagcaggacggcggctccagtgacgaggacagggctggcccagcccccccaggggccagtgatggcgtggacatccaggatgtgaagttcaagcttcggcatgacctggcgcagctgcaggccgctgccagctcagcccaggacctgagccgcgagcagctggctctgctgaagctggtgctgggccggggcctgtacccacagctggccgtccccgacgccttcaacagcagccgaaaggactcagaccagattttccacacgcaggccaagcagggcgccgtgctgcaccccacctgcgtcttcgctggcagccccgaggtgctgcacgcacaggagctggaggccagcaactgcgacggaagccgagacgacaaggacaagatgagcagcaaacaccagctcctcagcttcgtgtccctgctggagaccaacaagccgtacctggtgaactgcgtccgcatccctgccctccagtccctcctgctttttagccggtctttggacaccaatggtgactgctcccgcctggtggccgatggctggctggagctgcagctagcagacagtgaaagtgccatccgactcctggcggcttccctgcggctccgtgcccgctgggaaagtgccctggaccggcagctggcgcaccaggcccagcagcagctggaggaggaggaggaggatacgccagtcagccccaaggaggtggccaccctgagcaaggaactcctgcaattcacggcatccaagattccttacagcctccggcggctcacagggctagaagtccagaacatgtatgtgggaccccagaccatcccagccaccccccatcttcctggcctctttggcagctccaccctgtccccccaccccacaaaggggggctacgcagtcactgacttcctcacctacaactgcctcacgaatgacacagacctgtacagcgactgtctccgaaccttctggacctgcccccactgtggcctgcatgcgcccctcacgcccctggagcgcatcgcccatgagaacacctgcccccaggccccacaggatgggcccccaggggctgaggaagctgccctcgaaaccctccagaagacatctgtcctgcagaggccctaccactgcgaggcctgcgggaaggacttcctctttacacccacagaggtgctgcgccaccggaagcagcacgtgtgagctgggccaggagccctgcccacctccgtgcagctgacctgccctccagcccaggactaggggcaggactcttgcctgaacccccagcctgggcttagccctgtggtcctgtcccagtgcagagggcctggagcacggattgtgaataaagcctcacatgctgatacacactgttgttaggcctgcacctgcccatccagaaagcagcagctgccttgttagtcctccccagggtctagctttccttcttcctgctgcagggtgctgcctgaggggtcctgggtaggaggggcgttagagccagcagggacctcccatgtctccagattccaggtgcaggttcttagcacctccgcagccgctctctcttgagtccatcctcagtctctcctaccccttgaagtagggggaccctgaatttgcccatccacctgggtcactttgagagttgtgcaggggggctgggagcactggtgttcacgtgggaccacaggctgcaccataagacccactcacaataaaaaaataaaaggccgagccgggcatggttgctcactcccgtaataaaaaaataaaagaacaggctgagccgggaaaaaaaaaaaaaaaaaaa

SEQ ID NO: 443 - DNA, 3992 bp, Homo sapiens
ataaaagctgcccggggaagccaggagagcgaagggcggacgtactcgccacggcacccaggctgcgcgcacgcggtcccggtgtgcagctggagagcgagcggccaccgggagcccccggcacagcccgcgcccgccccgcaggagcccgcgaagatgccccggcgcagcctgcacgcggcggccgtgctcctgctggtgatcttaaaggaacagccttccagcccggccccagtgaacggttccaagtggacttattttggtcctgatggggagaatagctggtccaagaagtacccgtcgtgtgggggcctgctgcagtcccccatagacctgcacagtgacatcctccagtatgacgccagcctcacgcccctcgagttccaaggctacaatctgtctgccaacaagcagtttctcctgaccaacaatggccattcagtgaagctgaacctgccctcggacatgcacatccagggcctccagtctcgctacagtgccacgcagctgcacctgcactgggggaacccgaatgacccgcacggctctgagcacaccgtcagcggacagcacttcgccgccgagctgcacattgtccattataactcagacctttatcctgacgccagcactgccagcaacaagtcagaaggcctcgctgtcctggctgttctcattgagatgggctccttcaatccgtcctatgacaagatcttcagtcaccttcaacatgtaaagtacaaaggccaggaagcattcgtcccgggattcaacattgaagagctgcttccggagaggaccgctgaatattaccgctaccgggggtccctgaccacacccccttgcaaccccactgtgctctggacagttttccgaaaccccgtgcaaatttcccaggagcagctgctggctttggagacagccctgtactgcacacacatggacgacccttcccccagagaaatgatcaacaacttccggcaggtccagaagttcgatgagaggctggtatacacctccttctcccaagtgcaagtctgtactgcggcaggactgagtctgggcatcatcctctcactggccctggctggcattcttggcatctgtattgtggtggtggtgtccatttggcttttcagaaggaagagtatcaaaaaaggtgataacaagggagtcatttacaagccagccaccaagatggagactgaggcccacgcttgaggtccccggagctcccgggcacatccaggaaggaccttgctttggaccctacacacttcggctctctggacacttgcgacacctcaaggtgttctctgtagctcaatctgcaaacatgccaggcctcagggatcctctgctgggtgcctccttgccttgggaccatggccaccccagagccatccgatcgatggatgggatgcactctcagaccaagcagcaggaattcaaagctgcttgctgtaactgtgtgagattgtgaagtggtctgaattctggaatcacaaaccaagccatgctggtgggccattaatggttggaaaacactttcatccggggctttgccagagcgtgctttcaagtgtcctggaaattctgctgcttctccaagctttcagacaagaatgtgcactctctgcttaggttttgcttgggaaactcaacttctttcctctggagacggggcatctccctctgatttccttctgctatgacaaaacctttaatctgcaccttacaactcggggacaaatggggacaggaaggatcaagttgtagagagaaaaagaaaacaagagatatacattgtgatatattagggacactttcacagtcctgtcctctggatcacagacactgcacagaccttagggaatggcaggttcaagttccacttcttggtggggatgagaagggagagagagctagagggacaaagagaatgagaagacatggatgatctgggagagtctcactttggaatcagaattggaatcacattctgtttatcaagccataatgtaaggacagaataatacaatattaagtccaaatccaacctcctgtcagtggagcagttatgttttatactctacagattttacaaataatgaggctgttccttgaaaatgtgttgttgctgtgtcctggaggagacatgagttccgagatgacccaatctgcctttgaatctggaggaaataggcagaaacaaaatgactgtagaacttattctctgtaggccaaatttcatttcagccacttctgcaggatccctactgccaacctggaatggagacttttatctacttctctctctctgaagatgtcaaatcgtggtttagatcaaatatatttcaagctataaaagcaggaggttatctgtgcagggggctggcatcatgtatttaggggcaagtaataatggaatgctactaagatactccatattcttccccgaatcacacagacagtttctgacaggcgcaactcctccattttcctcccgcaggtgagaaccctgtggagatgagtcagtgccatgactgagaaggaaccgacccctagttgagagcaccttgcagttccccgagaactttctgattcacagtctcattttgacagcatgaaatgtcctcttgaagcatagctttttaaatatctttttccttctactcctccctctgactctaagaattctctcttctggaatcgcttgaacccaggaggcggaggttgcagtaagccaaggtcatgccactgcactctagcctgggtgacagagcgagactccatctcaaaaaaaaaaaaaaaaaaattattctgtaccatcacaacttttcacaacgatggcaagccttatgtcttgggagcctgttttgctaggcaaagttacaagtgacctaatgggagctcaaatgtgtgtgtgtctctctgtgtgtttgtgtgtgtgtgtgcactcaagacctctaacagcctcgaagcctggggtggcatcccggccttgccattagcatgcctcatgcatcatcagatgacaaggacaaccctcatgacgaagcaacatgaattagggggcctcttggccttggtccaaaattgtcaatcagaaatgaacataaaggactccagagcagtgggactgtctgtcaaaagactctgtatatcttttgtggatgagttttgtgagagaacagagagaccattgtacctggcacaagggctgttcatgaaaagggagacttactgggaggtgcaagacagtggcatttctcctctcctcttgctgctcagcacagccctggattgcagccccgaggctgagaccagacaaagcccgggaggcagaaagatgctccaagaaccaacactatcaatgtctttgcaaatcctcacaggattcctgtgggtccagctttggaactgggaaacctttcttcggatccgcactcattccactgatgccagctgcccctgaaggatgccagtactgtggtgtgtgagtctcagcagccgcccacacgctcctaactctgctgcatggcagatgcctaggtggaaatagcaaaaacaaggcccaggctggggccagggccagaggggaaggccctggattctcactcatgtgagatcttgaatctctttctttgttctgtttgtttagttagtatcatctggtaaaatagttaaaaaacaacaaaaaactctgtatctgtttctagcatgtgctgcattgactctattaatcacatttcaaattcaccctacattcctctcctcttcactagcctctctgaaggtgtcctggccagccctggagaagcactggtgtctgcagcacccctcagttcctgtgcctcagcccacaggccactgtgataatggtctgtttagcacttctgtatttattgtaagaatgattataatgaagatacacactgtaactacaagaaattataaatgtttttcacatcaaaaaaaaaaaaaaaaaa

SEQ ID NO: 444 - DNA, 2786 bp, Homo sapiens
agcactctccagcctctcaccgcaaaattacacaccccagtacaccagcagaggaaacttataacctcgggaggcgggtccttcccctcagtgcggtcacatacttccagaagagcggaccagggctgctgccagcacctgccactcagagcgcctctgtcgctgggacccttcagaactctctttgctcacaagttaccaaaaaaaaaagagccaacatgttggtattgctggctggtatctttgtggtccacatcgctactgttattatgctatttgttagcaccattgccaatgtctggttggtttccaatacggtagatgcatcagtaggtctttggaaaaactgtaccaacattagctgcagtgacagcctgtcatatgccagtgaagatgccctcaagacagtgcaggccttcatgattctctctatcatcttctgtgtcattgccctcctggtcttcgtgttccagctcttcaccatggagaagggaaaccggttcttcctctcaggggccaccacactggtgtgctggctgtgcattcttgtgggggtgtccatctacactagtcattatgcgaatcgtgatggaacgcagtatcaccacggctattcctacatcctgggctggatctgcttctgcttcagcttcatcatcggcgttctctatctggtcctgagaaagaaataaggccggacgagttcatggggatctggggggtggggaggaggaagccgttgaatctgggagggaagtggaggttgctgtacaggaaaaaccgagataggggaggggggagggggaagcaaaggggggaggtcaaatcccaaaccattactgaggggattctctactgccaagcccctgccctggggagaaagtagttggctagtactttgatgctcccttgatggggtccagagagcctccctgcagccaccagacttggcctccagctgttcttagtgacacacactgtctggggccccatcagctgccacaacaccagccccacttctgggtcatgcactgaggtccacagacctactgcactgagttaaaatagcggtacaagttctggcaagagcagatactgtctttgtgctgaatacgctaagcctggaagccatcctgcccttctgacccaaagcaaaacatcacattccagtctgaagtgcctactggggggctttggcctgtgagccattgtccctctttggaacagatatttagctctgtggaattcagtgacaaaatgggaggaggaaagagagtttgtaaggtcatgctggtgggttagctaaaccaagaaggagaccttttcacaatggaaaacctgggggatggtcagagcccagtcgagacctcacacacggctgtccctcatggagacctcatgccatggtctttgctaggcctcttgctgaaagccaaggcagctcttctggagtttctctaaagtcactagtgaacaattcggtggtaaaagtaccacacaaactatgggatccaaggggcagtcttgcaacagtgccatgttagggttatgtttttaggattcccctcaatgcagtcagtgtttcttttaagtatacaacaggagagagatggacatggctcattgtagcacaatcctattactcttcctctaacatttttgaggaagttttgtctaattatcaatattgaggatcagggctcctaggctcagtggtagctctggcttagacaccacctggagtgatcacctcttggggaccctgcctatcccacttcacaggtgaggcatggcaattctggaagctgattaaaacacacataaaccaaaaccaaacaacaggcccttgggtgaaaggtgctatataattgtgaagtattaagcctaccgtatttcagccatgataagaacagagtgcctgcattcccaggaaaatacgaaaatcccatgagataaataaaaatataggtgatgggcagatcttttctttaaaataaaaaagcaaaaactcttgtggtacctagtcagatggtagacgagctgtctgctgccgcaggagcacctctatacaggacttagaagtagtatgttattcctggttaagcaggcattgctttgccctggagcagctattttaagccatctcagattctgtctaaaggggttttttgggaagacgttttctttatcgccctgagaagatctaccccagggagaatctgagacatcttgcctacttttctttattagctttctcctcatccatttcttttatacctttcctttttggggagttgttatgccatgatttttggtatttatgtaaaaggattattactaattctatttctctatgtttattctagttaaggaaatgttgagggcaagccaccaaattacctaggctgaggttagagagattggccagcaaaaactgtgggaagatgaactttgtcattatgatttcattatcacatgattatagaaggctgtcttagtgcaaaaaacatacttacatttcagacatatccaaagggaatactcacattttgttaagaagttgaactatgactggagtaaaccatgtattcccttatcttttactttttttctgtgacatttatgtctcatgtaatttgcattactctggtggattgttctagtactgtattgggcttcttcgttaatagattatttcatatactataattgtaaatattttgatacaaatgtttataactctagggatataaaaacagattctgattcccttcaaaaaaaaaaaa

SEQ ID NO: 445 - DNA, 4742 bp, Homo sapiens
aaaatcccacgtgactggctctcctctcaggccatcatggcgtctcccagtgggaagggagcccgggcgctggaggctcctggctgcgggccccggccgctcgcccgggacctggtggactccgtggacgatgcggaggggctgtacgtggctgtggagcgctgcccgctgtgcaacactacccgccggcggctgacctgcgccaaatgcgttcagagcggcgatttcgtctacttcgacggccgcgaccgggagaggtttatcgacaagaaggaaaggttaagccgacttaagagcaagcaagaagaatttcagaaagaagtgttaaaagctatggaaggaaaatggataacagatcagttgagatggaaaataatgtcctgcaagatgaggattgaacagttaaaacaaacaatatgtaaaggaaatgaagaaatggagaaaaattctgaaggccttctcaaaaccaaggaaaagaatcagaagctttacagtcgagcacaacggcaccaagagaaaaaggagaagattcagaggcataatcgcaaacttggtgacctggtagaaaaaaagaccattgacttaagaagtcattatgagcgtctggcaaatcttcgacgatcccatatattagagctcacctctgtcatttttccaatcgaggaagtaaagacgggtgtgagagaccccgcagatgtgtcttcagagagtgacagtgccatgacctccagcactgtgagcaagcttgctgaagcccggaggacaacttacctctcaggacgatgggtctgtgacgatcacaacggagacaccagcattagcattacagggccttggattagcctccctaacaatggggactactctgcctactacagctgggtggaggagaagaaaacaacccaggggcctgacatggagcagagtaaccctgcctacaccatcagtgctgcgctgtgctatgcaactcagctggtcaacattctgtctcatatacttgatgtaaatcttcccaaaaagctctgcaacagtgaattttgtggcgaaaatctaagcaagcagaaatttactcgagcagtgaagaaactgaatgcaaatattctttacctttgtttttctcagcatgtaaatttagatcaattacaaccactgcataccctcaggaatctaatgtacctggtcagtccaagctctgaacacctaggcaggtcagggccctttgaagtacgagcagaccttgaggagtccatggaatttgtggatcccggagttgctggagaatcagatgagagcggagatgagcgcgtcagcgatgaagaaaccgacctgggcacagactgggagaacttgcctagtccccggttttgtgatatcccttcccagtctgtggaagtctcccagagtcagagcacccaggcgtccccacccatcgcgagcagcagtgcaggtgggatgatctcctctgcagcagcctcggtgacctcctggtttaaagcttacactggacaccgttaacgagcatggaccaaaacataccaaatctgcatcaagaaagttcttctcccactacactctagtaaacattttctgtttaagttaagatagtgtctggaacaaagaggttaaagtgttgttttgttttgtctttttaagcagggagacaaacatttctatttgccaagtggcctgtgatggtgaccaacatgcttatgataattaagagaacaggggtcgaaggtctttctacccagaccagtgctggtggaaggaggacctgtgcgtgtggccagttctgccaaggaagcagttgatttgggttccctctgggcccgggccaccgggcccacagatatgggtcagtgtgctggtccttgcggtgctgagactgttcctgacactttaagttttagaggttggttgaatcacaagaggtgattcttgattattaggacatgaaagataaaagctctttaataagagtttttctgccattgttttttgtatgagaaccagcaggcaatttaaaatttctaatttggtcctttgattttgtttgggaggggtgagttacacgtactttattcatgccgctctgtcgtagtttgtcagacattcctgtttttctttcccccacacaccaaagaaaatgaaagtctttttctttaggacccacatccataaatggaagaaatcctggctgcaataatgtctagagagtttttaactattttcttgtattctgaggggaattaagcttattcttacctagttgaattcctgccatccacactatgagcattttgaaattgaacttatattttctgggtgaaaataagtcatgaaggtcattcccttatgtaagctcaatgcctgcctgggcacaggggaaaagccacttagttaagtggcctctggtcattcttgtggtgtccactttctttctatgggattgagtaggtggcaggtgttttcaggggaaaccatcctacttgtttccccgaactctttgttgctctgaggacacagctttgctcagaaatgcagcgcagatccttacggctgatgctactctgctctgttctggggaaagcacaatataaagaaagaatttcccagccgggcgcggtggctcacgcctgtagtcccggcactttggggggccgaggcaggcggatcgcttgaggtcaggagtttgagagcagcctggctaacatggtggaaccctgtttctgctaaaaatacagaaaattaccgggtgtggtggcgcacgcctgtaatcccagctactcgggaggctgcggcgggagaatcgcttgaaccgggaggcagaggttgcagtgagccgagattgtgccattgcactccagcctgggcaacaagagcgaaactccgtctcaagaaaaaaaagaatttccctcagcaggagatcattttcagctcacgtgtcttgtcattcttttagtgacaatcttacaagaaaactataatgagagaggcattatgtacaaatatgtaagtagtttatttttaataactgcaaaaaaatcctatgtaacaactaccaaaagaaatcctatgaaagagtcctaacaggcattattaccatatcttatgtgattggcatgatagcacctctgataaatcattcagaggtttgccatgccccagcttcttttctcatcataataattgtagttgatactttgcctccaagtccgaggtgctatatagcttttgctaatggtatatttggtgttttgtatagttttgggtagagttgcagaacggagtttgtttctatccggtagtcacaaattccttggctctatgaattttccatgaaaggaggaagtaggcttttctcgttgtgggtggtcttttttttttttggagacggagtctcgctcagctgcccaggctggagtgtagtggcgccatctccgctcactgcaaccaccatctcctgggttcaggcggttcttccgtctcggcctcccgggtggctgggattataggcacctgccatcatgcccggctaatttttgtattttggtagggacgggggttttcgccatgttggccgggctggtcttgaactcctgacttcgggtgatccgcttgccttggcctcctagggtgctgggattgcaggcctgagccaccgcgcccggccccttatgggttcttctacactgctgggatctctgttttaagtgctcagcttcatgattgattgctgggcttccattttcccatccagttctggagttcgtagagagtgaagatggtagacttgaacagataaataaacttaacgatcttgtaagagttgtctagctacttaaaaccctcagaagtaagagcttagtctcacgagttgtaagagtgggatttggagcttggtggtggagactgacttcagctgagagatgcacaacagtcatggttttcttaagcctcttatgaaaccatgaatgagagatgaagctaaagaatagaatccagagatcacaaactcatctagagtacttccacaaaatttacaaagatgtgggaactttatggataggatatattttgtttgttgttgttaatatcaactagaggcactttacatagggttaagtgatcgaacccttttgtggttttgaacaccaacatactggcttacactgctgaaatattttgggtttcattattttgcactggatccaccctgtaaatactcttaagtatacatttcaaccactgttttttctactctttttgctgctcattaaaatctttcatgtaggtgccagaaccatatgtaaacagctttttaaaaaattgaagctggtattttgtttaaacaaaaagccatagaacttggtcatgttttccattttaaaatgatttactgaaacaaagtaatactaataaaaacccacaggcaccaaacaggctgcttaaaatggtctgttaaagacattttttggttatggaatataagaaaagttttgcacatctgtaagggggaaaaacagtatatcaccattgggtagagtggacgggactcatgtaaggactcaatttggggaagagcattcagtggcatgctgttagaggactagtgtccgagaatctcctcacagtatcatgttgcaggaattccccattgctctgcaacttccaaaccagtttgagtcatacaaatgttttctaaacttttattgtattactgcaataaatcttttaacagt

SEQ ID NO: 446 - DNA, 3394 bp, Homo sapiens
cccagcgcgcgcttcgcgtgtagaagcgtccgggtggcggaggccgcaggccgcaggagtgctggtggaggggcttccagaaagaccctgcggcagcgccccccctcggctctccccgcaggagagcgggcacctgcgcggcgccgggtgaaggcgagagcctcggcgagccctctgcagcggagccccctgcccatttggttttggaaccaccgggaggaactgggccattctaacacccgttgctaccatgctggccacccgcctctccagacccctgtcacggctcccaggaaaaaccctaagtgcctgtgatagagaaaatggagcaagacgcccactattgcttggttctacttcctttatcccgattggccgtcggacttatgccagtgcggcggagccggttggcagcaaagctgtcctggtcacaggctgtgactctggatttgggttctcattggccaagcatctgcattcaaaaggcttccttgtgtttgctggctgcttgatgaaggacaaaggccatgatggggtcaaggagctggacagcctaaacagtgaccgattgagaaccgtccagctcaatgtctgcagcagcgaagaggtggagaaagtggtggagattgtccgctcgagcctgaaggaccctgagaaaggcatgtggggcctcgttaacaatgccggcatctcaacgttcggggaggtggagttcaccagcctggagacctacaagcaggtggcagaagtgaacctttggggcacagtgcggatgacgaaatcctttctccccctcatccgaagggccaaaggccgcgtcgtcaatatcagcagcatgctgggccgcatggccaacccggcccgctccccgtactgcatcaccaagttcggggtagaggctttctcggactgcctgcgctatgagatgtaccccctgggcgtgaaggtcagcgtggtggagcccggcaacttcatcgctgccaccagcctttacagccctgagagcattcaggccatcgccaagaagatgtgggaggagctgcctgaggtcgtgcgcaaggactacggcaagaagtactttgatgaaaagatcgccaagatggagacctactgcagcagtggctccacagacacgtcccctgtcatcgatgctgtcacacacgccctgaccgccaccaccccctacacccgctaccaccccatggactactactggtggctgcgaatgcagatcatgacccacttgcctggagccatctccgacatgatctacatccgctgaagagtctcgctgtggcctctgtcagggatccctggtggaaggggaggggagggaggaacccatatagtcaactcttgattatccacgtgtggattatccaccatgccaggaagacccataactggttttaacactaactagagggaatgacttctttgcatagtgagtgacttgggccttcacaaacagggtgtggagtggcaggcagaggcctctaaatctcagggcaaacatggtgaatctatctctccggagataatttcatacagagattttaagaaaacatctttatattaaaaacagatctcatttgatccttaagccagtctcatgaatgaaaaggacaggtttttttcttttgtaaatgaagcatttgcagcttaaagaggatgcatgaaataacccttttatcgcttataaatagtgccagttatgtgttcctgccacggctgtggaaatacttcacatttgcattccaggactgttttggatccatttgcccgagaatcttctgactaactctgtgtcctcatctgggcagcacacaccaagtgcccactggtacctctgcatgtccatggtgctgtgtgactggccagccagcagccagtgactcagagctggctgtatggagggggtgggaatgtttctggagatttttgtttttccagacacagtcttgctcagtcccctaggctggagtgcaatggcaccatctccgctcactgcaacctccgcctccctggttcaagcggttctcctgcctcagccttccaagtagctggggttataggcacccaccaccatgccgggctaatttttgtatttttagtagagatggggtttcaccatgttggctaggctggtcccgaactcccgacttcaagtgatccgcctgccttggcctcccaaagtgctgggattacaggcatgagatttttacttgagatttttccatcctcttttaggactcaggatagacttgtgtggaggtgctctctggctaaggggataagttgttactggtttgggtctgcttggttttgccttgggtggggccggtgtcgatggggcaggcttggcacgagcagtggtgccatggcagggcactgtggcatctcccctagcagtggatttggggtccctgcttgcctcacgtggtgcttacacacatgtacacacacacacacacacacacacacacacacaccttacacacatgtacacacacacacacacacacacacacacacacacacacacacacacacacacacacacacacacacacacacccctgttctgcagggcttcagcgtggccttcattcccgcctcgcctcggcctcttttcaattaagaagtgatgccacttgaggcagggtctgcatgatcacttcttgggtttcagtttgaaagctgccatccctgcgactgcccagggcctgtatgttgggaccgaagccaaacaccactgtcctccagggggctttcggcccggggcagggtccccagtgcccgccttcgaatcagactccgcgtttccgcctctccctgggcggacctgccgctagagggcgctcctcctccgcagccggcgccggcctccagcgccccagactcccgcgctgccgcccgagcctgaggtttctcacggcgttcgggattcgcgcttcggaaaccgggaacaaagaagcaagcagcacccttcagaaacagtgttctcgctctcctagcagctggcccgggcccggaggctggtgccaggagaaggcagaagagcccgggcagccggagtgggctacggggttcaggcagtgccaaggaagaagggcctcacaatgggcaattcagctgcctcccgggccgttgtccccgctgtcttcaaacaggggtcccctgtcccagctgccccaggaggagggggggaggcaggcagggccgaaaccctccagagcccagagggggacgcttggtggccgctgcagttacataaccataggatgcttttgtaccgtggaccttgttctagcaggatcctttcggaattgcacttttacatgttgggcgaatttgtgtccgtgctgaagtttattaaaggaaaatagatgga

SEQ ID NO: 447 - DNA, 2810 bp, Homo sapiens
gagctggcgcagtgccctggtggcagtggctgaagtggcggcggcttcggcggctgcggcgtctgcaacagcttcgggctcggggttttggcggcggcgccggcgggctaggctgcgcggtgcggaccccggcgcgcggtccgggttgctggggcggcgcgtaagatgcctctaatggaggagtttctgagcagcacccctggcccagtggctttgaaagggagctcaaaccagagactatttcaagccctggatatcatatcctgagggccacaggagaagagaacatggctgtgagtttggatgacgacgtgccgctcatcctgaccttggatgagggtggcagtgccccactggctccctccaacggcctgggccaagaagagctacctagcaaaaatggcggcagctatgccatccacgactcccaggcccccagtctcagctctgggggtgagagttccccctccagccccgcacacaactgggagatgaattaccaagaggcagcaatctacctccaggaaggcgagaacaacgacaagttcttcacccaccccaaggatgccaaggcgctggcggcctacctctttgcacacaatcacctcttctacctgatggagctggccacggccctgctgctgctgctgctctccctgtgcgaggcccccgccgtccccgcactccggcttggcatctatgtccacgccaccctggagctgtttgccctgatggtggtagtgtttgaactctgcatgaagttacgctggctgggcctccacaccttcatccggcacaagcggaccatggtcaagacctcggtgctggtggtgcagtttgtcgaggccatcgtggtgttggtacggcagatgtcccatgtgcgggtgacccgagcactgcgctgcattttcctggtggactgtcggtattgcggtggcgtccggcgcaacctgcggcagatcttccagtccctgccgcccttcatggacatcctcctgctgctgctgttcttcatgatcatctttgccatcctcggtttctacttgttctcccctaacccttcagacccctacttcagcaccctggagaacagcatcgtcagtctgtttgtccttctgaccacagccaatttcccagatgtgatgatgccctcctactcccggaacccctggtcctgcgtcttcttcatcgtgtacctctccatcgagctgtatttcatcatgaacctgcttctggctgtggtgttcgacaccttcaatgacattgagaaacgcaagttcaagtctttgctactgcacaagcgaaccgctatccagcatgcctaccgcctgctcatcagccagaggaggcctgccggcatctcctacaggcagtttgaaggcctcatgcgcttctacaagccccggatgagtgccagggagcgctatcttaccttcaaggccctgaatcagaacaacacacccctgctcagcctaaaggacttttacgatatctacgaagttgctgctttgaagtggaaggccaagaaaaacagagagcactggtttgatgagcttcccaggacggcgctcctcatcttcaaaggtattaatatccttgtgaagtccaaggccttccagtatttcatgtacttggtggtggcagtcaacggggtctggatcctcgtggagacatttatgctgaaaggtgggaacttcttctccaagcacgtgccctggagttacctcgtctttctaactatctatggggtggagctgttcctgaaggttgccggcctgggccctgtggagtacttgtcttccggatggaacttgtttgacttctccgtgacagtgttcgccttcctgggactgctggcgctggccctcaacatggagcccttctatttcatcgtggtcctgcgccccctccagctgctgaggttgtttaagttgaaggagcgctaccgcaacgtgctggacaccatgttcgagctgctgccccggatggccagcctgggcctcaccctgctcatcttttactactccttcgccatcgtgggcatggagttcttctgcgggatcgtcttccccaactgctgcaacacgagtacagtggcagatgcctaccgctggcgcaaccacaccgtgggcaacaggaccgtggtggaggaaggctactattatctcaataattttgacaacatcctcaacagctttgtgaccctgtttgagctcacagttgtcaacaactggtacatcatcatggaaggcgtcacctctcagacctcccactggagccgcctctacttcatgaccttttacattgtgaccatggtggtgatgacgatcattgtcgcctttatcctcgaggccttcgtcttccgaatgaactacagccgcaagaaccaggactcggaagttgatggtggcatcacccttgagaaggaaatctccaaagaagagctggttgccgtcctggagctctaccgggaggcacggggggcctcctcggatgtcaccaggctgctggagaccctctcccagatggagagataccagcaacattccatggtgtttctgggacggcgatcaaggaccaagagcgacctgagcctgaagatgtaccaggaggagatccaggagtggtatgaggagcatgccagggagcaagagcagcagcgacaactcagcagcagtgcagcccccgccgcccagcagcccccaggcagccgccagcgctcccagaccgttacctagcccagcgcccgaaagccgtctcttctatgcaataacacaatagtattactctaaaaaaaaaaaaaaaaaaaa

SEQ ID NO: 448 - DNA, 4611 bp, Homo sapiens
tggaagaagatggcggaaggcggagcggcggatctggacacccagcggtctgacatcgcgacgctgctcaaaacctcgctccggaaaggggacacctggtacctagtcgatagtcgctggttcaaacagtggaaaaaatatgttggctttgacagttgggacaaataccagatgggagatcaaaatgtgtatcctggacccattgataactctggacttctcaaagatggtgatgcccagtcacttaaggaacatcttattgatgaattggattacatactgttgccaactgaaggttggaataaacttgtcagctggtacacattgatggaaggtcaagagccaatagcacgaaaggtggttgaacagggtatgtttgtaaagcactgcaaagtagaagtatatctcacagaattgaagctatgtgaaaatggaaacatgaataatgttgtaactcgaagatttagcaaagctgacacaatagatacaattgaaaaggaaataagaaaaatcttcagtattccagatgaaaaggagaccagattgtggaacaaatacatgagtaacacatttgaaccactgaataaaccagacagcaccattcaggatgctggtttataccaaggacaggtattagtgatagaacagaaaaatgaagatggaacatggccaaggggtccttctactcctaatgtgaaaaactcaaattactgtcttccatcatataccgcttataagaactatgattattcggaacctggaagaaacaatgaacagccaggcctctgtggcctaagtaacttgggaaatacgtgtttcatgaactcagctattcagtgtttgagcaacacacctccacttactgagtatttcctcaatgataagtatcaagaagaactgaattttgacaatcccttaggaatgagaggtgaaatagctaaatcttatgccgaactgatcaagcaaatgtggtctggaaagtttagctacgtcaccccaagagcctttaagacacaggtaggacgttttgcacctcagttctctggatatcagcagcaagactgtcaagaactgttagctttcctattagatggattacatgaggatttgaatagaattaggaaaaaaccatatatacaattaaaagatgcagatggaaggccagataaggtggttgccgaagaagcctgggaaaaccatttaaaacgaaatgattctatcatagtagatatatttcatggccttttcaaatcaactttagtttgtcctgagtgtgctaagatttcagtaacatttgatcctttttgttacttgacacttccattgcccatgaaaaaagaacgcaccttggaagtttacttagttagaatggatccgcttaccaaacctatgcagtacaaagtggttgtccccaaaattggaaacatattagatctttgtacagcattgtctgctttgtcaggaatacctgcagataagatgatagttactgatatatacaatcatagatttcacagaatattcgctatggatgaaaaccttagtagtattatggaacgggatgatatttatgtgtttgaaattaacatcaataggacagaagatacagagcacgtgattattcctgtttgcctaagagaaaaattcagacactcgagttatacccaccatactggttcttcactttttggtcagccctttcttatggctgtaccacgaaacaatactgaagacaaactttataatctcctgctcttgagaatgtgccgatatgtcaaaatatctactgaaactgaagaaactgaaggatccctacactgctgtaaggaccaaaatattaatgggaatggcccaaatggcatacatgaagaaggctcaccaagtgaaatggaaacagatgagccagatgatgaatccagccaggatcaagaacttccctcagagaatgaaaacagtcagtctgaagattcagttggaggagataatgattctgaaaatggattatgtactgaggatacttgcaaaggtcaactcacgggacacaaaaaacgattgtttacattccagttcaacaacttaggcaatactgatatcaactacatcaaagatgataccaggcatataagatttgatgataggcagcttaggctagatgaaagatcttttcttgctttggattgggatcctgatttgaaaaaaagatattttgatgaaaatgctgctgaggactttgaaaaacatgaaagtgtggagtataaacctcctaaaaaaccctttgtgaaattaaaagattgcattgaactttttacaacaaaagaaaagctaggtgctgaagatccctggtattgtccgaattgtaaagaacatcagcaagccacaaagaaattggatttatggtccctgcctccagtacttgtagtacatctcaagcgattttcttacagtcgatacatgagagacaagttggataccttagttgattttcctatcaatgacttggatatgtcggaattcttaattaatccaaatgcaggtccttgccgctataatctgattgctgtttccaaccactatggagggatgggaggaggacactatactgcttttgcaaaaaataaagatgatggaaaatggtactattttgatgacagtagtgtctccactgcatctgaagaccaaattgtgtccaaagcagcatatgtactcttctaccagagacaagacactttcagtggaactggcttttttcctcttgaccgagaaactaaaggtgcttcagctgccactggcatcccattagaaagtgatgaagatagcaatgataatgacaatgatatagaaaatgaaaactgtatgcacactaactaatgaaagtcctagaagccataaaagagacactttcctgctggtggtatctatggaaatgatgaagttacccaccacattaaaacaaaagtctgagatggggagtttcagataaccgaatgtaaatcctttatcagattttaacttgtgcagtacttgaagtgaaacacaatgaaaactttaacagaaattgtctcttaatacatttacagtcttgtatttacaagctaaatatatataggaaatcacaaataaatcccttttaagtttgctgctgttttgattaattatgtttcctttaattttttggatgtgagttgatgacaaatgttaaatttgtggatgttggtcatttattttgctctaataatactgcaagaaaactatggctgaacttagtttttggataatctagttcatgtgcattaggctgccgtatatactactatgatatttagctgcagtatcaatgtggcataaatactgcggcagcattcttcgaaaaccgcattttcaaatttatccccgtaatcaatgtgggcctattaaaaaaccaaatcatgatacaagaaacaaccttggaaaagttatttccctttgtaatacctttaaaaatccagagtattatattcattttactgccactgtggaaacaggttctagatttcatactccatctaaagtcatttttcagttacatgtaagtattatttactgctattgggatctattcttcagatattcaaaaacattttttgctttaaaatgcatatctttaattgggtgttggtccaaaattaaaatttttgctgtctgtttttctctaccccattttgtggtaatttggcaacttgagctctcccaattattgtaatataaggacagacataatagtattctgtacccatagtaataattgcatcaagcttagatgagaaatttttttcatatactggcctttaaatcattaatggacaattggctataaaggtaggtctgttaactttctttgtgtgttcctgatggaattcaccatagccttacagcttttctcagaaggtaacttgttataagagaaatggcatttgcatgttccagagtcagaacctgtacagtatataaagcataaacaccttgaatttgattttagttcaccacattcaaggatccaggatgccaaaaatatgtgtgaacatttgaaacatttttatttgctgctttttccctttgatatagttgaaagaatgtattgtaaattggcatacaatactgcctttaatagaaaacctaaatgctggggcacatttcacatatcgactacctgagaaattgctttgtgtcccactgttattaaagcaaaaagtataatgttcttcacttgaactaatcaaatacaatagattataaattgtgtattgtaaataaaagttcactctgtgagtgcacattttggtaaattatttatttatgttagcatttaaaagtttaaaaaaaatgcatttgaccaggataaatgaggtatgttgatcatggctttgctttatatcttgatattaaagctggtttatcatcctggtattttaaaagctgctttggggttttttttttcttttttttttttttaatgtaaactaacctcctgcatgacagaggttaaaattttgtctgcacttgagttcacttgagtttacatttgaaatgtgcatgtttatttatatagatttcaataaagctattcaaggcctt

SEQ ID NO: 449 - DNA, 2369 bp, Homo sapiens
cctgggcgccagcgcagcgtagcaaatccaggcagcgccacgcgcggccggggccgggcggaaccgagaagccgggaccgcgctgcgacgcgccggccgcatggagcctgccgccggtttcctgtctccgcgccccttccagcgtgcggccgccgcgcccgctcccccggccgggcccgggccgcctccgagtgccttgcgcggacctgagctggagatgctggccgggctaccgacgtcagaccccgggcgcctcatcacggacccgcgcagcggccgcacctacctcaaaggccgcttgttgggcaaggggggcttcgcccgctgctacgaggccactgacacagagactggcagcgcctacgctgtcaaagtcatcccgcagagccgcgtcgccaagccgcatcagcgcgagaagatcctaaatgagattgagctgcaccgagacctgcagcaccgccacatcgtgcgtttttcgcaccactttgaggacgctgacaacatctacattttcttggagctctgcagccgaaagtccctggcccacatctggaaggcccggcacaccctgttggagccagaagtgcgctactacctgcggcagatcctttctggcctcaagtacttgcaccagcgcggcatcttgcaccgggacctcaagttgggaaattttttcatcactgagaacatggaactgaaggtgggggattttgggctggcagcccggttggagcctccggagcagaggaagaagaccatctgtggcacccccaactatgtggctccagaagtgctgctgagacagggccacggccctgaggcggatgtatggtcactgggctgtgtcatgtacacgctgctctgcgggagccctccctttgagacggctgacctgaaggagacgtaccgctgcatcaagcaggttcactacacgctgcctgccagcctctcactgcctgcccggcagctcctggccgccatccttcgggcctcaccccgagaccgcccctctattgaccagatcctgcgccatgacttctttaccaagggctacacccccgatcgactccctatcagcagctgcgtgacagtcccagacctgacaccccccaacccagctaggagtctgtttgccaaagttaccaagagcctctttggcagaaagaagaagagtaagaatcatgcccaggagagggatgaggtctccggtttggtgagcggcctcatgcgcacatccgttggccatcaggatgccaggccagaggctccagcagcttctggcccagcccctgtcagcctggtagagacagcacctgaagacagctcaccccgtgggacactggcaagcagtggagatggatttgaagaaggtctgactgtggccacagtagtggagtcagccctttgtgctctgagaaattgtatagccttcatgcccccagcggaacagaacccggcccccctggcccagccagagcctctggtgtgggtcagcaagtgggttgactactccaataagttcggctttgggtatcaactgtccagccgccgtgtggctgtgctcttcaacgatggcacacatatggccctgtcggccaacagaaagactgtgcactacaatcccaccagcacaaagcacttctccttctccgtgggtgctgtgccccgggccctgcagcctcagctgggtatcctgcggtacttcgcctcctacatggagcagcacctcatgaagggtggagatctgcccagtgtggaagaggtagaggtacctgctccgcccttgctgctgcagtgggtcaagacggatcaggctctcctcatgctgtttagtgatggcactgtccaggtgaacttctacggggaccacaccaagctgattctcagtggctgggagcccctccttgtgacttttgtggcccgaaatcgtagtgcttgtacttacctcgcttcccaccttcggcagctgggctgctctccagacctgcggcagcgactccgctatgctctgcgcctgctccgggaccgcagcccagcctaggacccaagccctgaggcctgaggcctgtgcctgtcaggctctggcccttgcctttgtggccttcccccttcctttggtgcctcactgggggctttgggccgaatcccccagggaatcagggaccagctttactggagttgggggcggcttgtcttcgctggctcctaccccatctccaagataagcctgagccttagctcccagctagggggcgttatttatggaccacttttatttattgtcagacacttatttattgggatgtgagccccaggggggcctcctcctaggataataaacaattttgcagaattggaaaaaaaaaaaa

SEQ ID NO: 450 - DNA, 1600 bp, Homo sapiens
gccccgccgccggcagtggaccgctgtgcgcgaaccctgaaccctacggtcccgacccgcgggcgaggccgggtacctgggctgggatccggagcaagcgggcgagggcagcgccctaagcaggcccggagcgatggcagccttgatgaccccgggaaccggggccccacccgcgcctggtgacttctccggggaagggagccagggacttcccgacccttcgccagagcccaagcagctcccggagctgatccgcatgaagcgagacggaggccgcctgagcgaagcggacatcaggggcttcgtggccgctgtggtgaatgggagcgcgcagggcgcacagatcggggccatgctgatggccatccgacttcggggcatggatctggaggagacctcggtgctgacccaggccctggctcagtcgggacagcagctggagtggccagaggcctggcgccagcagcttgtggacaagcattccacagggggtgtgggtgacaaggtcagcctggtcctcgcacctgccctggcggcatgtggctgcaaggtgccaatgatcagcggacgtggtctggggcacacaggaggcaccttggataagctggagtctattcctggattcaatgtcatccagagcccagagcagatgcaagtgctgctggaccaggcgggctgctgtatcgtgggtcagagtgagcagctggttcctgcggacggaatcctatatgcagccagagatgtgacagccaccgtggacagcctgccactcatcacagcctccattctcagtaagaaactcgtggaggggctgtccgctctggtggtggacgttaagttcggaggggccgccgtcttccccaaccaggagcaggcccgggagctggcaaagacgctggttggcgtgggagccagcctagggcttcgggtcgcggcagcgctgaccgccatggacaagcccctgggtcgctgcgtgggccacgccctggaggtggaggaggcgctgctctgcatggacggcgcaggcccgccagacttaagggacctggtcaccacgctcgggggcgccctgctctggctcagcggacacgcggggactcaggctcagggcgctgcccgggtggccgcggcgctggacgacggctcggcccttggccgcttcgagcggatgctggcggcgcagggcgtggatcccggtctggcccgagccctgtgctcgggaagtcccgcagaacgccggcagctgctgcctcgcgcccgggagcaggaggagctgctggcgcccgcagatggcaccgtggagctggtccgggcgctgccgctggcgctggtgctgcacgagctcggggccgggcgcagccgcgctggggagccgctccgcctgggggtgggcgcagagctgctggtcgacgtgggtcagaggctgcgccgtgggaccccctggctccgcgtgcaccgggacggccccgcgctcagcggcccgcagagccgcgccctgcaggaggcgctcgtactctccgaccgcgcgccattcgccgccccctcgcccttcgcagagctcgttctgccgccgcagcaataaagctcctttgccgcgaaa

SEQ ID NO: 451 - DNA, 6180 bp, Homo sapiens
gccccggcggggcaaagtggcaggaacctcttaaagggcgagagcggcgcggagccagaacgcggtcggcccggtccccgccgcacccagcccagagaagagtttagtgactgaggccgaaaattcacagcaccaacagaaggaagagggtgaggaagccataaactcaggccaacaagaacctcagcaggaggaatcttgtcaaacagcagctgaaggagataattggtgtgaacagaagctgaaagcttctaatggagacactcctacacatgaagacttgaccaagaacaaggagcggacatcagaaagcagaggactttcacgactattctcctcgtttctcaaaaggcccaaatctcaggtgtccgaggaagaaggcaaagaagtagagtcagataaagaaaaaggtgaaggaggtcagaaagagatagaatttggaaccagtcttgatgaagagatcattttaaaggccccaattgcagctcctgaaccggaactcaaaacagacccatctttggatcttcattcattaagcagtgcagaaacacagcctcaccattacaattaagaattattttcagagtcttcttatttctgaagcatgtgaatattatctgcatcgttaaaagtcctgctcaggaagaactcagagaagatccagattttgaaattaaggaaggagaaggacttgaagagtgctccaaaatagaagtaaaagaagaaagccctcaatcaaaagcagaaacagaattaaaagcttcccaaaaaccaatcagaaaacacaggaacatgcactgcaaggtttctttgttggatgacacagtttatgaatgtgttgtggagaaacatgctaagggacaagatttgcttaaacgagtatgtgagcatctcaatcttttggaagaagactattttggtctagccatttgggataacgcaacctctaagacatggctggattccgccaaagaaataaaaaagcaggttcgtggtgtcccttggaattttacatttaatgtaaagttttatccacctgacccagcacagttaacagaagacataacaagatattatttatgtcttcagcttcggcaggacatagttgcaggacgtctgccctgttcctttgcaaccttagcattattaggttcttacaccatccagtctgaactgggagactacgacccagaactccatggcgtggattatgttagtgattttaaactggccccgaatcagaccaaggaacttgaagagaaggtcatggaactgcataagtcatacaggtccatgactccagctcaggctgacttggagtttcttgagaatgccaaaaagttgtctatgtatggagttgatcttcataaagcaaaggacttggaaggagtagatatcatcctaggtgtctgctctagtggccttctggtttacaaagataagctgagaattaaccgcttcccttggcccaaagtgctgaagatttcttataaacgtagtagctttttcatcaagattcggcctggagagcaagagcagtatgaaagtaccatcggattcaaacttcccagttaccgagcagctaagaaattatggaaagtctgtgtagaacatcacacgtttttcagattgacatctacagacaccattcccaaaagcaaatttcttgcgctaggatccaaatttcgatacagtggccggactcaagctcagaccaggcaagctagtgctctaattgacaggcctgccccacacttcgagcgtacagcaagtaaacgggcgtcccggagcctcgatggagcagcagctgtcgattcggcagaccgaagtcctcggcccacttctgcacctgccattactcagggtcaggttgcagaaggtggcgtcctagatgcctctgctaaaaaaacagtggtccctaaagcacagaaggaaacagtgaaggctgaagtgaaaaaggaagacgagccacctgagcaagctgagccagagcccacagaagcatggaagaaaaagagagaaagactagatggtgaaaacatttatatcagacatagcaatttaatgttggaggatttagacaagagtcaagaggagatcaaaaaacatcatgccagcatcagtgagctgaaaaagaacttcatggagtctgtaccagaaccacggcctagtgaatgggataaacgcttatccactcactcacccttccgaactcttaacatcaatgggcaaatccccacaggagaaggacctcccctggtgaagacacaaactgtcaccatctcagataatgccaatgctgtgaaaagtgaaatcccaaccaaagacgtccctattgtccacactgagaccaagaccatcacttatgaggctgcccagactgtaaaaggtgggatttcagagacacgtattgaaaagagaattgtgatcacaggagatgctgatattgaccatgatcaggtccttgtacaagccatcaaggaggcaaaggagcagcacccagacatgtcagtgaccaaggtggtcgtccaccaggagaccgagattgctgatgagtgagctcaggaactaacctaccccaactctgcccttctcccatccaagagaaaccagcaaaatgataaagaagctaacctgccatagtcagacttcagactttcaagattattctaaatcaccagaaaattaatttcagtttctattgggagtttataccaagagattcttctagatctcattgatccttttgaagagctttttctatattaggatatcagaattgttcaacttttcactctatagactgttttaagagttttggggtttttttaattgggtggtttgtaaccccttcagcctagcctctctgcccatttatttccaaccccaacagacactgacagggtccatggaattcttcgggaaatcctccaaggactcttgtcagctgtgttggaagccaaagccagcttagtgggacttccgcgtctctccctagtcttatcccctttggatgatggcagaaacttcatgaaccagccctttctcagagccagtgatgtgagtgtatcagaatgccagggagggcaccagccctgatccacagacctcggaaagatgcccctgttcctttgttgcgggtggttttggtaaggcagagccctctgctgagaatgtagtattgtttttcccctctccctcctgctttctttttggagcttctttgggtcaaagacatggaagttgcttcagatatctgatactgtgaatgtttgaacatatccgtggccttcacctctccagctacccttttacctcatcagaagcagtggctcagctaagtgctccccctagctcccatctcaggagaccaaatctcacagaaaaataggcactttgggccaaaagctctaatggaacatttttagtggtgatttggggaaggaaagttaatgaggtttttaaaataaggttttctagttttgagagtgtgcacttcacacaggggaatggggttacttctgtctgatcctgggcctttctttcatcccaaatgacaaggaatgtggctcagagaagggtttttcttttttgacctttcttctctcaacaggaacctgcctgaggacacccttctagagcaaggaattgacttttaggagccgttctccccacaagacaccacatgacaaggggtataagccccagccctgctcattcccactcaccagctgaggtctgtcaggttttgaaggcttgattttgtggtgggtttggggcttagttttcctttttttcattttgatttttgaaagtgaagatgatgccctaattcctggtaaggatttggggcatagttttttgtttttttgagacggagtttcgctcttgttgcccaagctggagtgcagtggcgcgatctcggctcactgcaacctccgcctcctgggttcaagcagttctcttgcctcagcctcccaagtagctgggatgacaggcgcacaccaccacgcccagcaaattttttgtatttttagtagaaacgggatttcaccttgttaggctggtctcgaactcctgacctcaggtgatccacccaccttggcctcccaaagtgctgggattacaggtgtgagccaccacgcccggccgatttggggcatttttatttaacagaacttctctaaccttccaactgcttcccacaaacacattggcctcaaggctccttagaatcccagttccagcttcctaaaatagacagtgggtatcgggcagcagtcactggggctcaagggcagtgagcaagagaaatgtctaaagctgcttctcccaacaccgtccaaagtctccactgcctgagttttgtttcggctggtttgaactcatttcgggtgtgtgcatttttcttttggtacccatgtgagacatgaacaacaggagggagggaaagagcccaggtgggacgtgggacaggcttaggggaaagagcttgtcctatctcaggaacaaaattataggctgtgggcagagggtctgaaaggtgggctttggggtagtgcccaagcctggtcgtgttgccaggagtggtgacaagaaatgcagcttacatcaaacgaacatgtagtgcatgcccactgcctgatggccagatggcctgtaggaagagctaccagggcttccagacctgtggaacgaagaggatggggaaaaggcagagggcactgagtgtccctttaaaaactaacccactgaatattccgtgtgatctagaacagtgtggcagctttcacagcacaggaccgttcatcgggggcctaaacgtttccctcagctctgtcaccaactcacttctctcggcttcgttgtctgtaaattggatgaaaagagctctaatgcctttcaggctcttagaagccatagatttggacaagcccagcaagatgggtgtccttccaggcctcttcccctttcctccatctctggcaacagttcttggggtttggcaattgtttggattttttttctttctgcagttgtgtgtatgtgtgtttgtgtgaagaaaaacagactctgtccaggtagaaatggtgaggagggggaagagaattacatttccagggtcagaaacttggcaacagttttcctagagtgactcagacacaccacagtaacaactctcgctgcaattttattttaatttgagaaataaagatttcctccaagccacatgaggactctggcacccacccacaaagcaagacctgtatttataagccgagggctcagggagcctaactgcgggacccgtcagggccccgtgacccatccccgtccccacccccccctccaccgctgggcccatcagtgtgtgttggggggatgcttggcagctgggggtgaggagacaacaaacctcgggaactggagccagagctgcggcctgactgacgccttttgatgctcacgggaaatttctgcccaggatctcagccccaggctggttgtttctacaaatctctctcaaatgtattattttggtgacaaaaatgaaggagctttgtaaattttttttaaaattatgaatcatatcaagtagttgtttacatttcttgaaaaaataggaactcgggcagcagaatcagattggcagaatctttagactacacaggcaataatcaagtctgctgttttggcctttcgtagtagaagtggttgtagtgtttagatatctgtttggtcttgcttcttgtattgcatttttttcaataaacaacaacaaaaagaactctctctgtgaggattgatccacttttaaatttctcttctaccagcaacttgggaaaaattaaatatgggtgggggagacctaaactcaagtcattttctaaagtaagttacccacattgaccaaaatgcagcttcaacgttgagtaaagggatttctgagagctggccaatgccttttgccagctgcagtgagattctgcagcataggccacgataaaggaaggagagaaggggcttctcagacttatttgcagaagggcccagaactcagtatgaaggcattggcagtagtgtagctctagagggatataccccagatggctgagggaagaaagggattgaggtggtaggagttcaaggctcagtccccgtcccagatggcagtggaga

SEQ ID NO: 452 - DNA, 9990 bp, Homo sapiens
aatagtgttggtgtcttgaaactgacgtaatgcgcggagactgaggtcctgacaagcgataacatttctgataaagacccgatcttactgcaatctctagcgtcctcttttttggtgctgctggtttctccagacctcgcgtcctctcgattgctctctcgccttcctatttcttttttttttttttaaacaaaaaacaacaccccctcccctctcccacccggcaccgggcacatccttgctctatttcctttctctttctctctctctctctctctctctcttttttaataagggtgggggagggaaaggggggggaggcaggaaagacctttttctctcccccccgcaataatccaagatcaactctgcaaacaacagaagacggttcatggctttggccgccgcgccaccatctttcgggctgccgagggtgttcttgacgattaatcaacagatgtacagatcagctctcaaaatgtcttctgtgtcttctgagcgtcttctaagacaattgcattagcctcctgctagttgactaatagaattaataattgtaaaaagcactctaaagccacatgccttatgaagtcaatgctgggtatgattttacaaatatggtccggaaaaagaacccccctctgagaaacgttgcaagtgaaggcgagggccagatcctggagcctataggtacagaaagcaaggtatctggaaagaacaaagaattttctgcagatcagatgtcagaaaatacggatcagagtgatgctgcagaactaaatcataaggaggaacatagcttgcatgttcaagatccatcttctagcagtaagaaggacttgaaaagcgcagttctgagtgagaaggctggcttcaattatgaaagccccagtaagggaggaaactttccctcctttccgcatgatgaggtgacagacagaaatatgttggctttctcatctccagctgctgggggagtctgtgagcccttgaagtctccgcaaagagcagaggcagatgaccctcaagatatggcctgcaccccctcaggggactcactggagacaaaggaagatcagaagatgtcaccaaaggctacagaggaaacagggcaagcacagagtggtcaagccaattgtcaaggtttgagcccagtttcagtggcctcaaaaaacccacaagtgccttcagatgggggtgtaagactgaataaatccaaaactgacttactggtgaatgacaacccagacccggcacctctgtctccagagcttcaggactttaaatgcaatatctgtggatatggttactacggcaacgaccccacagatctgattaagcacttccgaaagtatcacttaggactgcataaccgcaccaggcaagatgctgagctggacagcaaaatcttggcccttcataacatggtgcagttcagccattccaaagacttccagaaggtcaaccgttctgtgttttctggtgtgctgcaggacatcaattcttcaaggcctgttttactaaatgggacctatgatgtgcaggtgacttcaggtggaacattcattggcattggacggaaaacaccagattgccaagggaacaccaagtatttccgctgtaaattctgcaatttcacttatatgggcaactcatccaccgaattagaacaacattttcttcagactcacccaaacaaaataaaagcttctctcccctcctctgaggttgcaaaaccttcagagaaaaactctaacaagtccatccctgcacttcaatccagtgattctggagacttgggaaaatggcaggacaagataacagtcaaagcaggagatgacactcctgttgggtactcagtgcccataaagcccctcgattcctctagacaaaatggtacagaggccaccagttactactggtgtaaattttgtagtttcagctgtgagtcatctagctcacttaaactgctagaacattatggcaagcagcacggagcagtgcagtcaggcggccttaatccagagttaaatgataagctttccaggggctctgtcattaatcagaatgatctagccaaaagttcagaaggagagacaatgaccaagacagacaagagctcgagtggggctaaaaagaaggacttctccagcaagggagccgaggataatatggtaacgagctataattgtcagttctgtgacttccgatattccaaaagccatggccctgatgtaattgtagtggggccacttctccgtcattatcaacagctccataacattcacaagtgtaccattaaacactgtccattctgtcccagaggactttgcagcccagaaaagcaccttggagaaattacttatccgtttgcttgtagaaaaagtaattgttcccactgtgcactcttgcttctgcacttgtctcctggggcggctggaagctcgcgagtcaaacatcagtgccatcagtgttcattcaccacccctgacgtagatgtactcctctttcactatgaaagtgtgcatgagtcccaagcatcggatgtcaaacaagaagcaaatcacctgcaaggatcggatgggcagcagtctgtcaaggaaagcaaagaacactcatgtaccaaatgtgattttattacccaagtggaagaagagatttcccgacactacaggagagcacacagctgctacaaatgccgtcagtgcagttttacagctgccgatactcagtcactactggagcacttcaacactgttcactgccaggaacaggacatcactacagccaacggcgaagaggacggtcatgccatatccaccatcaaagaggagcccaaaattgacttcagggtctacaatctgctaactccagactctaaaatgggagagccagtttctgagagtgtggtgaagagagagaagctggaagagaaggacgggctcaaagagaaagtttggaccgagagttccagtgatgaccttcgcaatgtgacttggagaggggcagacatcctgcgggggagtccgtcatacacccaagcaagcctggggctgctgacgcctgtgtctggcacccaagagcagacaaagactctaagggatagtcccaatgtggaggccgcccatctggcgcgacctatttatggcttggctgtggaaaccaagggattcctgcagggggcgccagctggcggagagaagtctggggccctcccccagcagtatcctgcatcgggagaaaacaagtccaaggatgaatcccagtccctgttacggaggcgtagaggctccggtgttttttgtgccaattgcctgaccacaaagacctctctctggcgaaagaatgcaaatggcggatatgtatgcaacgcgtgtggcctctaccagaagcttcactcgactcccaggcctttaaacatcattaaacaaaacaacggtgagcagattattaggaggagaacaagaaagcgccttaacccagaggcacttcaggctgagcagctcaacaaacagcagaggggcagcaatgaggagcaagtcaatggaagcccgttagagaggaggtcagaagatcatctaactgaaagtcaccagagagaaattccactccccagcctaagtaaatacgaagcccagggttcattgactaaaagccattctgctcagcagccagtcctggtcagccaaactctggatattcacaaaaggatgcaacctttgcacattcagataaaaagtcctcaggaaagtactggagatccaggaaatagttcatccgtatctgaagggaaaggaagttctgagagaggcagtcctatagaaaagtacatgagacctgcgaaacacccaaattattcaccaccaggcagccctattgaaaagtaccagtacccactttttggacttccctttgtacataatgacttccagagtgaagctgattggctgcggttctggagtaaatataagctctccgttcctgggaatccgcactacttgagtcacgtgcctggcctaccaaatccttgccaaaactatgtgccttatcccaccttcaatctgcctcctcatttttcagctgttggatcagacaatgacattcctctagatttggcgatcaagcattccagacctgggccaactgcaaacggtgcctccaaggagaaaacgaaggcaccaccaaatgtaaaaaatgaaggtcccttgaatgtagtaaaaacagagaaagttgatagaagtactcaagatgaactttcaacaaaatgtgtgcactgtggcattgtctttctggatgaagtgatgtatgctttgcatatgagttgccatggtgacagtggacctttccagtgcagcatatgccagcatctttgcacggacaaatatgacttcacaacacatatccagaggggcctgcataggaacaatgcacaagtggaaaaaaatggaaaacctaaagagtaaaaccttagcacttagcacaattaaatagaaataggttttcttgatgggaattcaatagcttgtaatgtcttatgaagacctattaaaaaaatacttcatagagcctgccttatccaacatgaaattcccttcttttgttattctttcttttgatgagtaggttaccaagattaaaaagtgagataaatggtcaatgagaaagaatggaagatggtaaacaatcactttttaaaacctgttaagtcaaaaccatcttggctaatatgtactggggaaataatccataagagatatcaccagactagaattaatatatttataaagaaagagaccaaaactgtctagaatttgaaagggtttacatattattatactaaagcagtactggactggccattggaccatttgttccaaaacccataaattgttgcctaaatttataatgatcatgaaaccctaggcagaggaggagaaattgaaggtccagggcaatgaaagaaaaatggcgccctctcaatttagtcttctctcattggccatgtttcagattttgacctagaaatgcgagctgtggttaggcttggttagagtgcagcaagcaacatgacagatggtggcacgctgtttttacccagccctgcctgtacatacacatgcacaccctctctgatatttttgtcctttagatgttcaaatactcagtagtccttttgtttgcggtttagattcattttgtccacacatgtacccattttaaaaaacaatgtcctcgatgcttctgtagtgatttcattttagccaggtatttctttcttgtgtgtgatgaaccagtatggatttgcttttctaagcctcctgttggttactaatctcacttggcacattataactaaaggaatcccctcaattcaaaagcatagatggatacaaatgtcagaccgtgggtttaatttgtttagaacacatggcatttcttcacaaggtaacctgctgtatttatttattttcttttggttaaatataatttccaaactttgtggtcaggcagcgtctaaggttacgttaccacagactgacagttggtatatgtaccagccaatcccttcattaaatgtatacagatttagttaagtagcattaaataggattcttagaagtatgtcctcatagaacttttaatacttaaggctttgtaaaaactatccatgaagggaaagctcctcagcataactgctcagggaaatagggctaaataactgaacattaaataattggttaaaggtgctgttagtcgagcctcaatgcttgctacaaggatgtatgtacaaggactgactttaataatttgcattatattgtcccaaccagtagtttattttttgccacggagatgtagaagatattacaagctactggatgcactgtcagattaacttatttcattaaagaagttgggagaacaaataggaaaaaaaaaacttatttttctagtaaatattaatgtattacatttcaaataatggtgcctgacatattgaataattattttctacagtgtacgtatgcaacaaagatattccatcatgcattagagtcagttctggctctgcctagctgtttacatttgcaaatgtagcaaacaaggtaatgaagcaactatttctattgcagtagatatccttttgtgtgtgtgtgtgtgcattaaagttgtaaacggtaacatgaaacaaatgaaagttcttgctataatggtatggaaaacaagaaggaaatgaaaatatttttatgcctacttaggaaaaaaagggtagcacttattcattccaagtacttttttttttttaatttttaagctcttaactcacattgttatgcttaagatgataaacatatatcctctttttattgctttgtctatgtttcatatgaaacatttcagaaattattttgataagtgttgctggaatctgcaacgctgatttttttttgcattctgtagtcgcatttgcactccatttttacattaattcgcagttgctttgtatcattgttttgtttgggttttgtttctttttcacagtgccgggtcttcgtttcttaaagttggatggcaggtagagttcaaccagttcgtgactgttgtagcgaatgaagttaaaaaaatgtctttctgatgttgtgttgtcattttcatttttgcatttttttgtttgcatattaaaaaaagagaaaagagaaagcaagagacagaaatcaggactaagtcctctgcttcagtttcattgttaacgggccttattctgatctcacctgtcgcgtagctctaatattcacataaactgaaataaagaagtggaatgaggagctttgacattcaaattatgtgatgtaatttatcttccttaggaattttgatggatgcatctcaaaatgtatagccagacttgagaggtgacaattaaagatctaaaaaagagaggagattcccccaaacaacaatatttaattttcttagtaaaaagaataacagaatgcatcgtggcaatccttaagcaacattatctatgtggactgcttaaatcagcaaaacaccagaagtttggttaacttgggcaatatgacaagtattactttttgggcaaaactactcattaagcaatttctctagtgtgtcggacacaaataggttctttatttttggcatgtatgcctttttattttcattcaattttttttttttctcagacagacatagtagtatcaactagcattggaaaatacatatcactattcttggaatatttatggtcagtctactttttagtaaaatatttttggatagcgttgacacgatagatcttattccatacttctttattattgataattttattttcattttttgctttcattattatacatattttggtggagaagaggttgggcttttttgaaagagacaaaaatttattataacactaaacactccttttttgacatattaaagcctttattccatctctcaagatatattataaaatttatttttttaatttaagatttctgaattattttatcttaaattgtgattttaaacgagctattatggtacggaactttttttaatgaggaatttcatgatgatttaggaattttctctcttggaaaaggcttcccctgtgatgaaaatgatgtgccagctaaaattgtgtgccatttaaaaactgaaaatattttaaaattatttgtctatattctaaattgagctttggatcaaactttaggccaggaccagctcatgcgttctcattcttccttttctcactctttctctcatcactcacctctgtattcattctgttgtttgggatagaaaaatcataaagagccaacccatctcagaacgttgtggattgagagagacactacatgactccaagtatatgagaaaaggacagagctctaattgataactctgtagttcaaaaggaaaagagtatgcccaattctctctacatgacatattgagattttttttaatcaacttttaagatagtgatgttctgttctaaactgttctgttttagtgaaggtagatttttataaaacaagcatggggattcttttctaaggtaatattaatgagaagggaaaaaagtatctttaacagctctttgttgaagcctgtggtagcacattatgtttataattgcacatgtgcacataatctattatgatccaatgcaaatacagctccaaaaatattaaatgtatatatattttaaaatgcctgaggaaatacatttttcttaataaactgaagagtctcagtatggctattaaaataattattagcctcctgttgtgtggctgcaaaacatcacaaagtgaccggtcttgagacctgtgaactgctgccctgtttagtaaataaaattaatgcatttctagagggggaatatctgccatccagtggtggaaatgtggagtaaagaagctggtggtctgcttctgtgctgtatgccagccttttgccttaagttgagaggaggtcaactttagctactgtctttggtttgagagccatggcaaaaaaaaaaaaagaaaaaaagatcaagtcgtctttggtgagccagtaaggtgaaagcttgctgactgtccaaggcacaagagaaaattgaggaattgaaatgcaacctgagtatcaaactaaatattctaatcaaaggtaggtactgttaggtggaattctatcagcaggcaactgcaaatgagaagaagatagaaggacgcccgtcgggactttggagggcattgttattttcccaaagaaagacggccaagggcagaggcatggattctttgcagagcacttccttttggtttttcagtactgtttcatagacagtgggctcacatgttcctgatagtgctgcagttgcttagaaagcatcccagttaattgcagtaattagaacttctggaatatgctagggcagaagtatgtcaagtatgtcacatgaagaaaatgtgaaattcaagagtaatccacacgtgagaaactagacaatgtacattcatgtgttctcttgaaaggaaagggagagctgtaagcttcactctgtcctacaccggagaaaagcaggaataactttaccgtggaaataatgtttagcttttatcagagaaaattgtccttctagagcatagagtcccaaaactcaattctggttttcccctgttttttttttttttttttttcccaacatatgaactgcagcatatcactttttctttttgtgcctcaggttcctcacctgtaaaattgaaaaatatatgtattaataatattattaataataataatggtaatgtagtacttgtttgtaaagcactttgagatccttggttgaaaggcaccataggagtgccaagtattattatgtggccaagggggttatttaaactgtcagttcccaaaggccaggaaaggttggggtcatttttcttaaagacgagctgtaaatatcaactaggcagccaatagtgttgactatgaagatgcaaaactattactaggctgataaaatcatagtttcttaatggctaccaataaggcaaatatcacaataataaacgccaaattccttagggcggactatttgacaaccacatggaaaactttgggggaggcatgaggggggaacatctcaaaatgccaatgtaaaatttaacttacagcaatattcaccagcagaaaatgtctttcatatggaatgatttcatgttgctaagaaaaagaattcaatttgtagtcctgatttgaatactagaatgttggctataatagttctgttcttacaacacatgaaattttttcgttttattttattttgttttcatagtgcatgttcatttctactcacaaacatgttcttggtgtatttcttatgcaaacaatcttcaggcagcaaagatgtctgttacatctaaacttgaataataaagttttaccaccagttacaca

1. An agent that modulates the activity of a cancer stem cell specific nucleic acid molecule, or a polypeptide encoded by a cancer stem nucleic acid molecule, wherein said cancer cell specific nucleic acid molecule is selected from the group consisting of:
i) a nucleic acid molecule consisting of a nucleic acid sequence as represented in SEQ ID NO: 1-452;
ii) a nucleic acid molecule that hybridises under stringent hybridisation conditions to the nucleic acid molecule in (i) above and which encodes a polypeptide wherein said polypeptide is stem cell specific for use as a pharmaceutical.

2. An agent according to claim 1 wherein said agent is an antagonist.

3. An agent according to claim 1 wherein said agent is an agonist.

4. An agent that modulates the activity of a polypeptide comprising an amino acid sequence encoded by a nucleic acid molecule selected from the group consisting of:
i) a polypeptide encoded by a nucleic acid molecule as represented by the nucleic acid sequence in SEQ ID NO: 1-452;
ii) a polypeptide encoded by a a nucleic acid molecule that encodes a variant polypeptide wherein said variant polypeptide is modified by addition, deletion or substitution of at least one amino acid residue of the amino acid sequence encoded by a nucleic acid sequence selected from the group consisting of SEQ ID NO: 1-452 wherein said polypeptide is stem cell specific characterized in that said agent is for use as a pharmaceutical.

5. An agent according to claim 4 wherein said agent is a polypeptide.

6. An agent according to claim 5 wherein said polypeptide is an antibody or an active binding part of an antibody.

7. An agent according to claim 6 wherein said antibody is a monoclonal antibody or active binding part thereof.

8. An agent according to claim 6 wherein said antibody is a chimeric antibody or a humanised antibody.

9. An agent according to claim 6, wherein said agent is an antibody fragment.

10. An agent according to claim 9 wherein said fragment is selected from the group consisting of: Fab, Fab₂, F(ab′)₂, Fv, Fc, Fd, or scFvs.

11. An agent according to claim 10 wherein said antibody fragment is a single chain antibody variable region fragment.

12. An agent according to claim 10 wherein said antibody is bispecific binding two epitopes of two different antigens.

13. An agent according to claim 6 wherein said antibody is an opsonic antibody.

14. An agent according to claim 6, wherein said antibody is provided with a marker or tag.

15. An agent according to claim 6 wherein said antibody, or antibody fragment, has associated therewith or crosslinked thereto a therapeutic agent.

16. An agent according to claim 15 wherein said therapeutic agent is a chemotherapeutic agent.

17. An agent according to claim 15 wherein said agent is selected from the group consisting of: cisplatin; carboplatin; cyclophosphamide; melphalan; carmusline; methotrexate; 5-fluorouracil; cytarabine; mercaptopurine; daunorubicin; doxorubicin; epirubicin; vinblastine; vincristine; dactinomycin; mitomycin C; taxol; L-asparaginase; G-CSF; etoposide; colchicine; derferoxamine mesylate; and camptothecin.

18. An agent according to claim 1, wherein said agent is a nucleic acid molecule.

19. An agent according to claim 18 wherein said nucleic acid molecule is selected from the group consisting of: an antisense nucleic acid, an aptamer, or a small interfering RNA.

20. An agent according to claim 19 wherein said nucleic acid molecule is a small interfering RNA.

21. An agent according to claim 20 wherein said small interfering RNA is 21-29 nucleotides in length.

22. A pharmaceutical composition comprising an agent according to claim 1.

23. A composition comprising a nucleic acid molecule selected from the group consisting of:
i) a nucleic acid molecule consisting of a nucleic acid sequence as represented in SEQ ID NO: 1-452;
ii) a nucleic acid molecule that hybridizes under stringent hybridization conditions to the nucleic acid molecule in (i) above and which encodes a polypeptide wherein said polypeptide is stem cell specific for use as a vaccine.

24. A composition comprising a polypeptide comprising an amino acid sequence encoded by a nucleic acid molecule as represented in SEQ ID NO 1-452, or a variant polypeptide wherein said variant is modified by addition, deletion or substitution of at least one amino acid residue of the amino acid sequence encoded by a nucleic acid molecule as represented in SEQ ID NO 1-452 for use as a vaccine.

25. A composition according to claim 24 wherein said composition includes an adjuvant and/or a carrier.

26. A vector which is adapted for the expression of a humanised or chimeric antibody or an antibody fragment according to claim 8.

27. A cell which has been transformed or transfected with the vector according to claim 26 encoding the humanised or chimeric antibody or an antibody fragment.

28. A method for the production of the humanised or chimeric antibody or an antibody fragment comprising:
i) providing a cell transformed or transfected with a vector which comprises a nucleic acid molecule encoding the humanised or chimeric antibody according to claim 8;
ii) growing said cell in conditions conducive to the manufacture of said antibody; and
iii) purifying said antibody from said cell, or its growth environment.

29. A hybridoma cell line which produces a monoclonal antibody according to claim 7.

30. A method of producing monoclonal antibodies according to claim 7 comprising using hybridoma cell line which produces a monoclonal antibody.

31. A method for preparing a hybridoma cell-line producing a monoclonal antibody comprising the steps of:
i) immunizing an immunocompetent mammal with an immunogen comprising at least one polypeptide having the amino acid sequence encoded by a nucleic acid molecule comprising a nucleic acid sequence as represented in SEQ ID NO 1-452, or fragments thereof;
ii) fusing lymphocytes of the immunized immunocompetent mammal with myeloma cells to form hybridoma cells;
iii) screening monoclonal antibodies produced by the hybridoma cells of step (ii) for binding activity to the polypeptide of (i);
iv) culturing the hybridoma cells to proliferate and/or to secrete said monoclonal antibody; and
v) recovering the monoclonal antibody from the culture supernatant.

32. A diagnostic assay for the determination of cancer in a subject comprising the steps of:
i) providing an isolated cell sample;
ii) contacting the sample in (i) with a binding agent(s) that binds to a nucleic acid molecule as represented by the nucleic acid sequence in SEQ ID NO 1-452, or a nucleic acid molecule that hybridizes to said nucleic acid molecule under stringent hybridization conditions and encodes a variant polypeptide; and
iii) determining the expression of said nucleic acid molecule in said sample when compared to a normal matched control sample.

33. An assay according to claim 32 wherein said binding agent(s) is an oligonucleotide primer.

34. An assay according to claim 33 wherein said assay is a polymerase chain reaction.

35. An assay according to claim 32 wherein said binding agent is an antibody that specifically binds a polypeptide encoded by a nucleic acid molecule as represented by the nucleic acid sequence in SEQ ID NO 1-452, or a polypeptide variant comprising an amino acid sequence that varies from a reference amino acid sequence by addition, deletion or substitution of at least one amino acid residue.

36. An assay according to claim 35 wherein said cancer is prostate cancer.

37. A kit comprising a binding agent specifically reactive with a nucleic acid molecule as represented by the nucleic acid sequence in SEQ ID NO 1-452, or an agent specifically reactive with a polypeptide comprising an amino acid sequence encoded by a nucleic acid molecule comprising a nucleic acid sequence as represented in SEQ ID NO 1-452.

38. A kit according to claim 37 wherein said kit further comprises an oligonucleotide or antibody specifically reactive with said nucleic acid molecule or said polypeptide.

39. A kit according to claim 37 wherein said kit comprises a thermostable DNA polymerase and components required for conducting the amplification of nucleic acid.

40. A kit according to claim 37, wherein said kit includes a set of instructions for conducting said polymerase chain reaction and control nucleic acid.

41. A kit according to claim 37, wherein said kit comprises an antibody specifically reactive with said polypeptide.

42. A kit according to claim 41 wherein said kit comprises components required for conducting an immunoassay including, for example, a secondary antibody specifically reactive with a primary antibody that specifically binds said polypeptide(s) and enzyme reagents required to detect the binding of said secondary antibody with said primary antibody.

43. A method to screen for an agent that modulates the activity of a polypeptide encoded by a nucleic acid molecule selected from the group consisting of:
a) a nucleic acid molecule consisting of a nucleic acid sequence as represented in SEQ ID NO 1-452;
b) a nucleic acid molecule that hybridizes under stringent hybridization conditions to the nucleic acid molecule in (i) above and which encodes a polypeptide wherein said polypeptide is stem cell specific;
said method comprising:
i) forming a preparation comprising a polypeptide, or sequence variant thereof, and at least one agent to be tested;
ii) determining the activity of said agent with respect to the activity of said polypeptide.

44. A method according to claim 43 wherein said agent is an antagonist.

45. A method according to claim 43 wherein said agent is an agonist.

46. A method to treat a subject for a cancer comprising administering an effective amount of an agent according to claim 1.

47. A method according to claim 46 wherein said subject is human.

48. A method according to claim 47 wherein said cancer is prostate cancer.

49. A method to immunise an animal against a cancerous condition comprising administering an effective amount of a nucleic acid or polypeptide encoded by a nucleic acid molecule selected from the group consisting of:
i) a nucleic acid molecule consisting of a nucleic acid sequence as represented in SEQ ID NO 1-452;
ii) a nucleic acid molecule that hybridizes under stringent hybridization conditions to the nucleic acid molecule in (i) above and which encodes a polypeptide wherein said polypeptide is stem cell specific.

50. A method according to claim 49 wherein said animal is a human.

51. A method according to claim 50 wherein said cancer is prostate cancer.
